(19) United States
(12) Patent Application Publication
(10) Pub. No.: US 2023/0241168 A1
(43) Pub. Date: Aug. 3, 2023

(54) APRIL AND BAFF INHIBITORY IMMUNOMODULATORY PROTEINS WITH AND WITHOUT A T CELL INHIBITORY PROTEIN AND METHODS OF USE THEREOF

(71) Applicant: Alpine Immune Sciences, Inc., Seattle, WA (US)

(72) Inventors: Stacey DILLON, Seattle, WA (US); Mark RIXON, Seattle, WA (US); Lawrence EVANS, Seattle, CA (US); Daniel William DEMONTE, Seattle, WA (US); Joseph L. KUIJPER, Seattle, WA (US); Stanford L. PENG, Seattle, WA (US); Ryan SWANSON, SEATTLE, WA (US)

(73) Assignee: Alpine Immune Sciences, Inc., Seattle, WA (US)

(21) Appl. No.: 17/923,208

(22) PCT Filed: May 7, 2021
(86) PCT No.: PCT/US2021/031432

§ 371 Date: Nov. 3, 2022

Related U.S. Application Data
(60) Provisional application No. 63/080,643, filed on Sep. 18, 2020.
(60) Provisional application No. 63/034,361, filed on Jun. 3, 2020.
(60) Provisional application No. 63/022,373, filed on May 8, 2020.

(51) Int. Cl. A61K 38/17; A61K 47/64; A61P 37/06

(52) U.S. Cl. CPC A61K 38/1774; A61K 38/1793; A61K 47/6425; A61P 37/06

(57) ABSTRACT

Provided herein are immunomodulatory proteins that exhibit neutralizing activity of BAFF and APRIL (or BAFF/APRIL heterotrimers) alone, or also coupled with inhibition of T cell costimulation. The immunomodulatory proteins provided herein include variant domains of B cell maturation antigen (BCMA) alone, or multi-domain immunomodulatory protein that inhibit B cell responses and also can inhibit T cell costimulation. Also provided are nucleic acids molecules encoding the immunomodulatory proteins. The immunomodulatory proteins provide therapeutic utility for a variety of immunological diseases or conditions. Also provided are compositions and methods for making and using such proteins.

### CROSS REFERENCE TO RELATED APPLICATIONS

[0001] This application claims priority to U.S. provisional application 63/022,373 entitled “APRIL AND BAFF INHIBITORY IMMUNOMODULATORY PROTEINS WITH AND WITHOUT A T CELL INHIBITORY PROTEIN AND METHODS OF USE THEREOF”, filed May 8, 2020, to U.S. provisional application 63/034,361, entitled “APRIL AND BAFF INHIBITORY IMMUNOMODULATORY PROTEINS WITH AND WITHOUT A T CELL INHIBITORY PROTEIN AND METHODS OF USE THEREOF”, filed Jun. 3, 2020, and to U.S. provisional application 63/080,643, entitled “APRIL AND BAFF INHIBITORY IMMUNOMODULATORY PROTEINS WITH AND WITHOUT A T CELL INHIBITORY PROTEIN AND METHODS OF USE THEREOF”, filed Sep. 18, 2020, the contents of each of which are incorporated by reference in their entirety for all purposes.

### INCORPORATION BY REFERENCE OF SEQUENCE LISTING

[0002] The present application is being filed along with a Sequence Listing in electronic format. The Sequence Listing is provided as a file entitled 761612002340SeqList.TXT, created May 4, 2021, which is 992, 602 bytes in size. The information in the electronic format of the Sequence Listing is incorporated by reference in its entirety.

### FIELD

[0003] The present disclosure provides immunomodulatory proteins that exhibit neutralizing activity of BAFF and APRIL (or BAFF/APRIL heterotrimers) alone, or also coupled with inhibition of T cell costimulation. The immunomodulatory proteins include variant domains of B cell maturation antigen (BCMA) alone, and multi-domain immunomodulatory proteins that inhibit B cell responses and also can inhibit T cell costimulation. The present disclosure also provides nucleic acids molecules encoding the immunomodulatory proteins. The immunomodulatory proteins provide therapeutic utility for a variety of immunological diseases or conditions. Compositions and methods for making and using such proteins are provided.

### BACKGROUND

[0004] Modulation of the immune response by intervening in the processes involving interactions between soluble ligands and their receptor is of increasing medical interest. Currently, biologics used to enhance or suppress immune responses have generally been limited to antibodies (e.g., anti-PD-1 antibodies) or soluble receptors against a single cell surface molecule (e.g., Fc-CTLA-4). Improved therapeutic agents that can modulate the immune response, and particularly B cell immune responses and, in some cases also T cell immune responses, are needed. Provided are embodiments that meet such needs.

### SUMMARY

[0005] Provided herein is an immunomodulatory protein that contains at least one T cell inhibitory molecule (TIM) that binds to a T cell stimulatory receptor, or a ligand of a T cell stimulatory receptor; and that antagonizes activity of a T cell stimulatory receptor; and at least one B cell inhibitory molecule (BIM) that binds to a ligand of a B cell stimulatory receptor and/or antagonizes activity of a B cell stimulatory receptor. In some of any embodiments, the immunomodulatory protein contains at least one T cell inhibitory molecule (TIM) that binds to a T cell stimulatory receptor, or a ligand of a T cell stimulatory receptor; or antagonizes activity of a T cell stimulatory receptor; and at least one B cell inhibitory molecule (BIM) that binds to a ligand of a B cell stimulatory receptor and/or antagonizes activity of a B cell stimulatory receptor.

[0006] In some of any embodiments, the TIM binds to a ligand of a T cell stimulatory receptor. In some of any embodiments, the T cell stimulatory receptor is CD28; and the ligand of the T cell stimulatory receptor is CD80 or CD86. In some of any embodiments, the T cell stimulatory receptor is CD28; or the ligand of the T cell stimulatory receptor is CD80 or CD86.

[0007] In some of any embodiments, the TIM is a CTLA-4 extracellular domain or a binding portion thereof that binds to CD80 or CD86. In some of any embodiments, the CTLA-4 extracellular domain or binding portion thereof consists of the sequence of amino acids set forth in SEQ ID NO:1 or SEQ ID NO:2, a variant CTLA-4 sequence of amino acids that has at least 85% sequence identity to SEQ ID NO:1 or SEQ ID NO:2; or a portion thereof containing an IgV domain. In some of any embodiments, the CTLA-4 extracellular domain consists of the sequence of amino acids set forth in SEQ ID NO: 1. In some of any embodiments, the CTLA-4 extracellular domain consists of a variant CTLA-4 sequence of amino acids that has at least 85% sequence identity to SEQ ID NO:1 or a portion thereof containing an IgV domain, wherein the variant sequence comprises one or more amino acid substitutions in SEQ ID NO:1 or the portion thereof containing the IgV domain.

[0008] In some of any embodiments, the variant CTLA-4 sequence comprises the amino acid substitution C122S. In some embodiments, the CTLA-4 extracellular domain or the binding portion thereof is set forth in SEQ ID NO: 668.

[0009] In some of any embodiments, the variant CTLA-4 binds to the ectodomain of CD80 and CD86, optionally wherein binding affinity to one or both of CD80 and CD86 is increased compared to the sequence set forth in SEQ ID NO:1 or the portion thereof containing the IgV domain.

[0010] In some of any embodiments, the one or more amino acid substitutions in a variant CLTA-4 polypeptide comprise amino acid substitutions selected from L12F, R16H, G29W, T53S, M56T, N58S, L63P, L98Q, or Y105L, or combinations thereof. In some embodiments, the one or more amino acid substitutions comprise G29W, L98Q and Y105L. In some embodiments, the one or more amino acid substitutions are G29W/N58S/L63P/Q82R/L98Q/Y105L. In some embodiments, the one or more amino acid substitutions are L12F/R16H/G29W/M56T/L98Q/Y105L. In some embodiments, the one or more amino acid substitutionsare G29W/L98Q/Y105L.

[0011] In some of any embodiments, a variant CTLA-4 polypeptide is one in which the variant CTLA-4 polypeptide has at least about 85%, at least about 90% or at least about 95% sequence identity to SEQ ID NO: 1, and contains the one or more amino acid substitutions as described.

[0012] In some of any embodiments, a variant CTLA-4 polypeptide is one in which the variant CTLA-4 polypeptide has at least about 85%, at least about 90% or at least about 95% sequence identity to SEQ ID NO:2, and contains the one or more amino acid substitutions as described.

[0013] In some embodiments, the CTLA-4 extracellular domain or the binding portion thereof is set forth in any one of SEQ ID NO:92, SEQ ID NO: 112, SEQ ID NO: 165 or SEQ ID NO: 186 or a portion thereof comprising the IgV domain.

[0014] In some of any embodiments, the variant CTLA-4 consists of the sequence set forth in SEQ ID NO:92 or a portion thereof containing the IgV domain. In some of any embodiments, the variant CTLA-4 consists of the sequence set forth in SEQ ID NO: 113 or a portion thereof containing the IgV domain. In some of any embodiments, the variant CTLA-4 consists of the sequence set forth in SEQ ID NO: 165 or a portion thereof containing the IgV domain. In some of any embodiments, the variant CTLA-4 consists of the sequence set forth in SEQ ID NO: 186 or a portion thereof containing the IgV domain.

[0015] In some of any embodiments, the ligand of a B cell stimulatory receptor is APRIL or BAFF; and the B cell stimulatory receptor is TACI, BCMA, or BAFF-receptor. In some of any embodiments, the ligand of a B cell stimulatory receptor is APRIL or BAFF; or the B cell stimulatory receptor is TACI, BCMA, or BAFF-receptor.

[0016] In some of any embodiments, the BIM is a TACI polypeptide that consists of the TACI extracellular domain or a binding portion thereof that binds to APRIL, BAFF, or a BAFF/APRIL heterotrimer. In some embodiments, the BIM is a TACI extracellular domain or the binding portion thereof that has an extracellular domain sequence set forth as (i) the sequence of amino acids set forth in SEQ ID NO:709, (ii) a sequence of amino acids that has at least 95% sequence identity to SEQ ID NO:709; or (iii) a portion of (i) or (ii) comprising one or both of a CRD1 domain and CRD2 domain that binds to APRIL, BAFF, or a BAFF/APRIL heterotrimer. In some embodiments, the BIM is a TACI extracellular domain or the binding portion thereof that comprises the CRD1 domain and the CRD2 domain.

[0017] In some of any embodiments, a BIM that is a TACI polypeptide is one in which the TACI polypeptide is a truncated wild-type TACI extracellular domain that consists of the sequence set forth in SEQ ID NO: 516.

[0018] In some of any embodiments, a BIM that is a TACI polypeptide is a truncated wild-type TACI extracellular domain or is a variant thereof, wherein the truncated wild-type TACI extracellular domain contains the cysteine rich domain 2 (CRD2) but lacks the entirety of the cysteine rich domain 1 (CRD1), and/or wherein the variant TACI polypeptide comprises one or more amino acid substitutions in the truncated wild-type TACI extracellular domain.

[0019] In some of any embodiments, the a BIM that is a TACI polypeptide is a truncated wild-type TACI extracellular domain or is a variant thereof, wherein the truncated wild-type TACI extracellular domain consists of a contiguous sequence contained within amino acid residues 67-118 that includes amino acid residues 71-104, with reference to positions set forth in SEQ ID NO:709, wherein the variant TACI polypeptide comprises one or more amino acid substitutions in the truncated wild-type TACI extracellular domain.

[0020] In some of any embodiments, a BIM that is a TACI polypeptide is one in which the truncated wild-type TACI extracellular domain is 35, 36, 37, 38, 39, 40, 41, 42, 43, 44, 45, 46, 47, 48, 59, 50 or 51 amino acids in length. In some of any embodiments, the truncated wild-type TACI extracellular domain consists of amino acid residues 68-110 set forth in SEQ ID NO: 709. In some of any embodiments, the TACI polypeptide consists of the sequence of amino acid set forth in SEQ ID NO:528 or is a variant thereof containing one or more amino acid substitutions in the sequence set forth in SEQ ID NO: 528.

[0021] In some of any embodiments, a BIM that is a TACI polypeptide is one in which the TACI polypeptide is a truncated wild-type TACI extracellular domain that consists of the sequence set forth in SEQ ID NO: 528.

[0022] In some of any embodiments, a BIM that is a TACI polypeptide is one in which the truncated TACI polypeptide or the variant thereof binds to APRIL, BAFF, or a BAFF/APRIL heterotrimer.

[0023] In some of any embodiments, a BIM that is a TACI polypeptide is one in which the TACI polypeptide is a variant TACI polypeptide, wherein the variant TACI polypeptide has increased binding affinity to one or both of APRIL and BAFF compared to the truncated TACI polypeptide.

[0024] In some of any embodiments, the variant TACI polypeptide comprises one or more amino acid substitutions in the extracellular domain (ECD) of a reference TACI polypeptide or a specific binding fragment thereof at positions selected from among 74, 75, 76, 77, 78, 79, 82, 83, 84, 85, 86, 87, 88, 92, 95, 97, 98, 99, 101, 102 and 103, corresponding to numbering set forth in SEQ ID NO: 709. In some of any embodiments, the one or more amino acid substitutions are selected from E74V, Q75E, Q75R, G76S, K77E, F78Y, Y79F, L82H, L82P, L83S, R84G, R84L, R84Q, D85E, D85V, C86Y, I87L, I87M, S88N, I92V, Q95R, P97S, K98T, Q99E, A101D, Y102D, F103S, F103V, F103Y, or a conservative amino acid substitution thereof. In some of any embodiments, the one or more amino acid substitutions comprise at least one of E74V, K77E, Y79F, L82H, L82P, R84G, R84L, R84Q, D85V, or C86Y. In some of any embodiments, the one or more amino acid substitutions are D85E/K98T, I87L/K98T, L82P/I87L, G76S/P97S, K77E/R84L/F103Y, Y79F/Q99E, L83S/F103S, K77E/R84Q, K77E/A101D, K77E/F78Y/Y102D, Q75E/R84Q, Q75R/R84G/I92V, K77E/A101D/Y102D, R84Q/S88N/A101D, R84Q/F103V, K77E/Q95R/A101D or I87M/A101D. In some embodiments, the one or more amino acid substitutions are K77E/F78Y/Y102D. In some embodiments, the one or more amino acid substitutions are Q75E/R84Q. In some embodiments, a BIM that is a TACI polypeptide is the variant TACI polypeptide set forth in SEQ ID NO: 541. In some embodiments, a BIM that is a TACI polypeptide is the variant TACI polypeptide set forth in SEQ ID NO:542.

[0025] In some of any embodiments, a BIM that is a TACI polypeptide is one in which the TACI polypeptide is a variant TACI polypeptide that comprises one or more amino acid substitutions in the extracellular domain (ECD) of a reference TACI polypeptide or a specific binding fragment thereof at positions selected from among 40, 59, 60, 61, 74, 75, 76, 77, 78, 79, 82, 83, 84, 85, 86, 87, 88, 92, 95, 97, 98, 99, 101, 102 and 103, corresponding to numbering of positions set forth in SEQ ID NO:709. In some of any embodiments, the one or more amino acid substitutions are selected from W40R, Q59R, R60G, T61P E74V, Q75E, Q75R, G76S, K77E, F78Y, Y79F, L82H, L82P, L83S, R84G, R84L, R84Q, D85E, D85V, C86Y, I87L, I87M, S88N, I92V, Q95R, P97S, K98T, Q99E, A101D, Y102D, F103S, F103V, F103Y, or a conservative amino acid substitution thereof.

[0026] In some of any embodiments, the one or more amino acid substitutions comprise at least one of E74V, K77E, Y79F, L82H, L82P, R84G, R84L, R84Q, D85V or C86Y. In some of any embodiments, the one or more amino acid substitution comprise at least the amino acid substitution K77E. In some of any embodiments, the one or more amino acid substitution comprise at least the amino acid substitution R84G. In some of any embodiments, the one or more amino acid substitution comprise at least the amino acid substitution R84Q.

[0027] In some of any embodiments, the reference TACI polypeptide is a truncated polypeptide consisting of the extracellular domain of TACI or a specific binding portion thereof that binds to APRIL, BAFF, or a BAFF/APRIL heterotrimer.

[0028] In some of any embodiments, the reference TACI polypeptide comprises (i) the sequence of amino acids set forth in SEQ ID NO:709, (ii) a sequence of amino acids that has at least 95% sequence identity to SEQ ID NO:709; or (iii) a portion of (i) or (ii) containing one or both of a CRD1 domain and CRD2 domain that binds to APRIL, BAFF, or a BAFF/APRIL heterotrimer. In some of any embodiments, the reference TACI polypeptide lacks an N-terminal methionine. In some of any embodiments, the reference TACI polypeptide comprises the CRD1 domain and the CRD2 domain. In some of any embodiments, the reference TACI polypeptide comprises the sequence set forth in SEQ ID NO:516. In some of any embodiments, the reference TACI polypeptide consists of the sequence set forth in SEQ ID NO:516. In some of any embodiments, the reference TACI polypeptide consists essentially of the CRD2 domain. In some of any embodiments, the reference TACI polypeptide comprises the sequence set forth in SEQ ID NO:528. In some of any embodiments, the reference TACI polypeptide consists of the sequence set forth in SEQ ID NO:528.

[0029] In some of any embodiments, the one or more amino acid substitutions are D85E/K98T, I87L/K98T, R60G/Q75E/L82P, R60G/C86Y, W40R/L82P/F103Y, W40R/Q59R/T61P/K98T, L82P/I87L, G76S/P97S, K77E/R84L/F103Y, Y79F/Q99E, L83S/F103S, K77E/R84Q, K77E/A101D, K77E/F78Y/Y102D, Q75E/R84Q, Q75R/R84G/I92V, K77E/A101D/Y102D, R84Q/S88N/A101D, R84Q/F103V, K77E/Q95R/A101D or I87M/A101D. In some of any embodiments, the one or more amino acid substitutions are K77E/F78Y/Y102D. In some of any embodiments, the one or more amino acid substitutions are Q75E/R84Q.

[0030] In some of any embodiments, a BIM that that is a TACI polypeptide is one in which the variant TACI polypeptide has at least about 85%, at least about 90% or at least about 95% sequence identity to SEQ ID NO:709, and contains the one or more amino acid substitutions as described.

[0031] In some of any embodiments, a BIM that that is a TACI polypeptide is one in which the variant TACI polypeptide has at least about 85%, at least about 90% or at least about 95% sequence identity to SEQ ID NO:719, and contains the one or more amino acid substitutions as described.

[0032] In some of any embodiments, a BIM that that is a TACI polypeptide is one in which the variant TACI polypeptide has at least about 85%, at least about 90% or at least about 95% sequence identity to SEQ ID NO:718, and contains the one or more amino acid substitutions as described.

[0033] In some of any embodiments, a BIM that that is a TACI polypeptide is one in which the variant TACI polypeptide has at least about 85%, at least about 90% or at least about 95% sequence identity to SEQ ID NO:516, and contains the one or more amino acid substitutions as described.

[0034] In some of any embodiments, a BIM that that is a TACI polypeptide is one in which the variant TACI polypeptide has at least about 85%, at least about 90% or at least about 95% sequence identity to SEQ ID NO:528, and contains the one or more amino acid substitutions as described.

[0035] In some of any embodiments, a BIM that is a TACI polypeptide is one in which the variant TACI polypeptide has increased binding affinity to one or both of APRIL and BAFF compared to the reference TACI polypeptide. In some of any embodiments, the variant TACI polypeptide has increased binding affinity to APRIL. In some of any embodiments, the variant TACI polypeptide has increased binding affinity to BAFF. In some of any embodiments, the variant TACI polypeptide has increased binding affinity to APRIL and BAFF. In some of any embodiments, the increased binding affinity for BAFF or APRIL is independently increased more than 1.2-fold, 1.5-fold, 2-fold, 3-fold, 4-fold, 5-fold, 6-fold, 7-fold, 8-fold, 9-fold, 10-fold, 20-fold, 30-fold, 40-fold, 50-fold or 60-fold.

[0036] In some of any embodiments, a BIM that is a TACI polypeptide is one in which the variant TACI polypeptide comprises the sequence set forth in any one of SEQ ID NOS: 517-527, 536, 537, 682-701. In some of any embodiments, a BIM that is a TACI polypeptide is one in which the variant TACI polypeptide comprises the sequence set forth in any one of SEQ ID NOS: 529-535, 538-550, or 673-681. In some of any embodiments, a BIM that is a TACI polypeptide is one in which the variant TACI polypeptide consists or consists essentially of the sequence set forth in any one of SEQ ID NOS: 517-527, 536, 537, 682-701. In some of any embodiments, a BIM that is a TACI polypeptide is one in which the variant TACI polypeptide consists or consists essentially of the sequence set forth in any one of SEQ ID NOS: 529-535, 538-550, 673-681.

[0037] In some of any embodiments, a BIM is a TACI polypeptide in which the variant TACI polypeptide is is set forth in any one of SEQ ID NO:535, SEQ ID NO: 541, SEQ ID NO:542, or SEQ ID NO:688.

[0038] In some of any embodiments, a BIM is a TACI polypeptide is one in which the variant TACI polyeptide consists or consists essentially of the sequence set forth in SEQ ID NO:535. In some of any embodiments, a BIM that is a TACI polypeptide is one in which the variant TACI polypeptide consists or consists essentially of the sequence set forth in SEQ ID NO: 541. In some of any embodiments, a BIM that is a TACI polypeptide is one in which the variant TACI polypeptide consists or consists essentially of the sequence set forth in SEQ ID NO:542. In some of any embodiments, a BIM that is a TACI polypeptide is one in which the variant TACI polypeptide consists or consists essentially of the sequence set forth in SEQ ID NO:688. In some of any embodiments, a BIM that is a TACI polypeptide is one in which the variant TACI polypeptide consists or consists essentially of the sequence set forth in SEQ ID NO:535.

[0039] In some of any embodiments, the BIM is a BCMA polypeptide that consists of the BCMA extracellular domain or a binding portion thereof that binds to APRIL, BAFF, or a BAFF/APRIL heterotrimer. In some of any embodiments, the BCMA extracellular domain or the binding portion thereof is an extracellular domain sequence set forth as (i) the sequence of amino acids set forth in SEQ ID NO:356, (ii) a sequence of amino acids that has at least 95% sequence identity to SEQ ID NO:356; or (iii) a portion of (i) or (ii) comprising a CRD domain.

[0040] In some of any embodiments, the BCMA polypeptide consists of the sequence set forth in SEQ ID NO:356. In some of any embodiments, the BCMA polypeptide is a variant BCMA polypeptide containing one or more amino acid substitutions in the extracellular domain (ECD) of a reference BCMA polypeptide or a specific binding fragment at positions selected from among 9, 10, 11, 14, 16, 19, 20, 22, 25, 27, 29, 30, 31, 32, 35, 36, 39, 43, 45, 46, 47 and 48, corresponding to numbering set forth in SEQ ID NO: 710.

[0041] Provided herein is an immunomodulatory protein containing a variant BCMA polypeptide, wherein the variant BCMA polypeptide comprises one or more amino acid substitutions in the extracellular domain (ECD) of a reference BCMA polypeptide or a specific binding fragment thereof at positions selected from among 9, 10, 11, 14, 16, 19, 20, 22, 25, 27, 29, 30, 31, 32, 35, 36, 39, 43, 45, 46, 47 and 48, corresponding to numbering of positions set forth in SEQ ID NO:710. In some of any embodiments, the reference BCMA polypeptide is a polypeptide consisting of the extracellular domain of BCMA or a specific binding portion thereof that binds to APRIL, BAFF, or a BAFF/APRIL heterotrimer. In some of any embodiments, the reference BCMA polypeptide comprises (i) the sequence of amino acids set forth in SEQ ID NO:710, (ii) a sequence of amino acids that has at least 95% 37a.equence identity to SEQ ID NO:710; or (iii) a portion of (i) or (ii) containing the CRD. In some of any embodiments, the reference BCMA lacks an N-terminal methionine.

[0042] In some of any embodiments, the reference BCMA polypeptide comprises (i) the sequence of amino acids set forth in SEQ ID NO:356, (ii) a sequence of amino acids that has at least 95% sequence identity to SEQ ID NO:356; or (iii) a portion of (i) or (ii) containing the CRD. In some of any embodiments, the reference BCMA polypeptide comprises the sequence set forth in SEQ ID NO:356. In some of any embodiments, the reference BCMA polypeptide consists of the sequence set forth in SEQ ID NO:356.

[0043] In some of any embodiments, the one or more amino acid substitutions of a BCMA polypeptide are selected from S9G, S9N, S9Y, Q10E, Q10P, N11D, N11S, F14Y, S16A, H19A, H19C, H19D, H19E, H19F, H19G, H19I, H19K, H19L, H19M, H19N, H19P, H19Q, H19R, H19S, H19T, H19V, H19W, H19Y, A20T, I22L, I22V, Q25E, Q25F, Q25G, Q25H, Q25I, Q25K, Q25L, Q25M, Q25S, Q25V, Q25Y, R27H, R27L, S29P, S30G, S30Y, N31D, N31G, N31H, N31K, N31L, N31M, N31P, N31S, N31V, N31Y, T32I, T32S, L35A, L35M, L35P, L35S, L35V, L35Y, T36A, T36G, T36N, T36M, T36S, T36V, R39L, R39Q, A43E, A43S, V45A, V45D, V45I, T46A, T46I, N47D, N47Y, S48G, or a conservative amino acid substitution thereof.

[0044] In some of any embodiments, the one or more amino acid substitutions of a BCMA polypeptide comprise at least one substitution at position 19. In some embodiments, at least one substitution is selected from H19A, H19C, H19D, H19E, H19F, H19G, H19I, H19K, H19L, H19M, H19N, H19P, H19Q, H19R, H19S, H19T, H19V, H19W, H19Y. In some of any embodiments, the one or more amino acid substitution comprise at least the amino acid substitution H19L. In some of any embodiments, the one or more amino acid substitution comprise at least the amino acid substitution H19K. In some of any embodiments, the one or more amino acid substitution comprise at least the amino acid substitution H19R. In some of any embodiments, the one or more amino acid substitution comprise at least the amino acid substitution H19Y.

[0045] In some of any embodiments, the one or more amino acid substitutions of a BCMA polypeptide comprise at least one substitution at position 25. In some embodiments, at least one substitution is selected from Q25E, Q25F, Q25G, Q25H, Q25I, Q25K, Q25L, Q25M, Q25S, Q25V, Q25Y.

[0046] In some of any embodiments, the one or more amino acid substitutions of a BCMA polypeptide comprise at least one substitution at position 31. In some embodiments, at least one substitution is selected from N31D, N31G, N31H, N31K, N31L, N31M, N31P, N31S, N31V, N31Y.

[0047] In some of any embodiments, the one or more amino acid substitutions of a BCMA polypeptide comprise at least one substitution at position 35. In some embodiments, at least one substitution is selected from L35A, L35M, L35P, L35S, L35V, L35Y.

[0048] In some of any embodiments, the one or more amino acid substitutions of a BCMA polypeptide comprise at least one substitution at position 36. In some embodiments, at least one substitution is selected from T36A, T36G, T36N, T36M, T36S, T36V.

[0049] In some of any embodiments, the one or more amino acid substitutions of a BCMA polypeptide are H19Y/S30G; H19Y/V45A; F14Y/H19Y; H19Y/V45D; H19Y/A43E; H19Y/T36A; H19Y/I22V; N11D/H19Y; H19Y/T36M; N11S/H19Y; H19Y/L35P/T46A; H19Y/N47D; S9D/H19Y; H19Y/S30G/V45D; H19Y/R39Q; H19Y/L35P; S9D/H19Y/R27H; Q10P/H19Y/Q25H; H19Y/R39L/N47D; N11D/H19Y/N47D; H19Y/T32S; N11S/H19Y/S29P; H19Y/R39Q/N47D; S16A/H19Y/R39Q; S9N/H19Y/N31K/T46I; H19Y/R27L/N31Y/T32S/T36A; N11S/H19Y/T46A; H19Y/T32I; S9G/H19Y/T36S/A43S; H19Y/S48G; S9N/H19Y/I22V/N31D; S9N/H19Y/Q25K/N31D; S9G/H19Y/T32S; H19Y/T36A/N47Y; H19Y/V45A/T46I; H19Y/Q25K/N31D; H19Y/Q25H/R39Q/V45D; H19Y/T32S/N47D; Q10E/H19Y/A20T/T36S; H19Y/T32S/V45I; H19F/Q25E/N31L/L35Y/T36S; H19F/Q25F/N31S/T36S; H19I/Q25F/N31S/T36V; H19F/Q25V/N31M/T36S; H19Y/Q25Y/N31L/L35Y/T36S; H19F/Q25I/N31M/L35A/T36S; H19I/Q25L/N31L/L35Y/T36S; H19F/Q25L/N31G/L35P/T36A; H19Y/I22L/N31G; H19F/I22V/Q25M/N31P/T36M; H19Y/N31L/L35Y/T36S; H19L/S30G/N31H/L35A; H19L/Q25S/N31V/L35S/T36V; H19L/Q25S/S30Y/N31G/L35M/T36V; H19F/Q25F/N31L/L35Y/T36S; H19F/Q25F/N31S/T36G; H19F/I22V/Q25S/N31V/L35S/T36V; H19F/Q25G/N31S/L35V/T36N; H19L/Q25H/N31D/L35S; or H19F/Q25F/N31S/L35Y/T36S.

[0050] In some of any embodiments, the one or more amino acid substitutions of a BCMA polypeptide comprise H19F, H19L, H19K, H19M, H19R, H10Y, N11D/H19Y/N47D, H19Y/R39Q/N47D; S16A/H19Y/R39Q, S9G/H19Y/T32S; H19Y/T36A/N47Y; or Q10E/H19Y/A20T/T36S. In some of any embodiments, the one or more amino acid substitutions of a BCMA polypeptide comprise S16A/H19Y/R39Q.

[0051] In some of any embodiments, a variant BCMA polypeptide is one in which the variant BCMA polypeptide has at least about 85%, at least about 90% or at least about 95% sequence identity to SEQ ID NO:710, and contains the one or more amino acid substitutions as described.

[0052] In some of any embodiments, a variant BCMA polypeptide is one in which the variant BCMA polypeptide has at least about 85%, at least about 90% or at least about 95% sequence identity to SEQ ID NO:356, and contains the one or more amino acid substitutions as described.

[0053] In some of any embodiments, the variant BCMA polypeptide has up to 10 amino acid substitutions compared to the reference BCMA polypeptide. In some of any embodiments, the variant BCMA polypeptide has up to 5 amino acid substitutions compared to the reference BCMA polypeptide. In some of any embodiments, the variant BCMA polypeptide has at least 90% sequence identity to SEQ ID NO:356. In some of any embodiments, the variant BCMA polypeptide has at least 95% sequence identity to SEQ ID NO:356.

[0054] In some of any embodiments, the variant BCMA polypeptide has increased binding affinity to one or both of APRIL and BAFF compared to the reference BCMA polypeptide. In some of any embodiments, the variant BCMA polypeptide has increased binding affinity to APRIL. In some of any embodiments, the variant BCMA polypeptide has increased binding affinity to BAFF. In some of any embodiments, the variant BCMA polypeptide has increased binding affinity to APRIL and BAFF. In some of any embodiments, the increased binding affinity for BAFF or APRIL is independently increased more than 1.2-fold, 1.5-fold, 2-fold, 3-fold, 4-fold, 5-fold, 6-fold, 7-fold, 8-fold, 9-fold, 10-fold, 20-fold, 30-fold, 40-fold, 50-fold or 60-fold.

[0055] In some of any embodiments, the variant BCMA polypeptide comprises the sequence set forth in any one of SEQ ID NOS: 357-435. In some of any embodiments, the variant BCMA polypeptide consists or consists essentially of the sequence set forth in any one of SEQ ID NOS: 357-435. In some of any embodiments, the variant BCMA polypeptide consists or consists essentially of the sequence set forth in SEQ ID NO: 357. In some of any embodiments, the variant BCMA polypeptide consists or consists essentially of the sequence set forth in SEQ ID NO: 377. In some of any embodiments, the variant BCMA polypeptide consists or consists essentially of the sequence set forth in SEQ ID NO: 380. In some of any embodiments, the variant BCMA polypeptide consists or consists essentially of the sequence set forth in SEQ ID NO: 381. In some of any embodiments, the variant BCMA polypeptide consists or consists essentially of the sequence set forth in SEQ ID NO: 390. In some of any embodiments, the variant BCMA polypeptide consists or consists essentially of the sequence set forth in SEQ ID NO: 391. In some of any embodiments, the variant BCMA polypeptide consists or consists essentially of the sequence set forth in SEQ ID NO: 396. In some of any embodiments, the variant BCMA polypeptide consists or consists essentially of the sequence set forth in SEQ ID NO: 402. In some of any embodiments, the variant BCMA polypeptide consists or consists essentially of the sequence set forth in SEQ ID NO: 405. In some of any embodiments, the variant BCMA polypeptide consists or consists essentially of the sequence set forth in SEQ ID NO: 406. In some of any embodiments, the variant BCMA polypeptide consists or consists essentially of the sequence set forth in SEQ ID NO: 407. In some of any embodiments, the variant BCMA polypeptide consists or consists essentially of the sequence set forth in SEQ ID NO:411. In some of any embodiments, the variant BCMA polypeptide consists or consists essentially of the sequence set forth in SEQ ID NO:405. In some of any embodiments, the variant BCMA polypeptide consists or consists essentially of the sequence set forth in SEQ ID NO:406.

[0056] In some of any embodiments, the immunomodulatory protein contains a heterologous moiety that is linked to the at least one BCMA polypeptide. In some of any embodiments, the heterologous moiety is a half-life extending moiety, a multimerization domain, a targeting moiety that binds to a molecule on the surface of a cell, or a detectable label. In some of any embodiments, the half-life extending moiety comprises a multimerization domain, albumin, an albumin-binding polypeptide, Pro/Ala/Ser (PAS), a C-terminal peptide (CTP) of the beta subunit of human chorionic gonadotropin, polyethylene glycol (PEG), long unstructured hydrophilic sequences of amino acids (XTEN), hydroxyethyl starch (HES), an albumin-binding small molecule, or a combination thereof.

[0057] In some of any embodiments, the immunomodulatory protein contains an Fc region of an immunoglobulin that is linked to the at least one BCMA polypeptide.

[0058] In some of any embodiments, the at least one TIM comprises only one TIM. In some of any embodiments, the at least one TIM comprises 2, 3, 4, or 5 TIMs, optionally wherein each TIM is the same. In some of any embodiments, each TIM is linked directly or indirectly via a linker, optionally wherein the linker is a peptide linker. In some of any embodiments, the at least one BIM comprises only one BIM. In some of any embodiments, the at least one BIM comprises 2, 3, 4, or 5 BIMs, optionally wherein each BIM is the same. In some of any embodiments, each BIM is linked directly or indirectly via a linker, optionally wherein the linker is a peptide linker.

[0059] In some of any embodiments, the linker is a peptide linker and the peptide linker is selected from GSGGS (SEQ ID NO: 592), GGGGS (G4S; SEQ ID NO: 593), GSGGGGS (SEQ ID NO: 590), GGGGSGGGGS (2×GGGGS; SEQ ID NO: 594), GGGGSGGGGSGGGGS (3×GGGGS; SEQ ID NO: 595), GGGGSGGGGSGGGGSGGGGS (4×GGGGS, SEQ ID NO:600), GGGGSGGGGSGGGGSGGGGSGGGGS (5×GGGGS, SEQ ID NO: 671), GGGGSSA (SEQ ID NO: 596) or combinations thereof.

[0060] In some of any embodiments, the at least one TIM and the at least one BIM are linked directly or indirectly via a linker, optionally wherein the linker comprises a peptide linker and/or a multimerization moiety. In some of any embodiments, the linker comprises a peptide linker and the peptide linker is selected from GSGGS (SEQ ID NO: 592), GGGGS (G4S; SEQ ID NO: 593), GSGGGGS (SEQ ID NO: 590), GGGGSGGGGS (2×GGGGS; SEQ ID NO: 594), GGGGSGGGGSGGGGS (3×GGGGS; SEQ ID NO: 595), GGGGSGGGGSGGGGSGGGGS (4×GGGGS, SEQ ID NO:600), GGGGSGGGGSGGGGSGGGGSGGGGS (5×GGGGS, SEQ ID NO: 671), GGGGSSA (SEQ ID NO: 596) or combinations thereof. In some of any embodiments, the linker comprises a peptide linker and the peptide linker is selected from SEQ ID NO: 711 (1×EAAAK), SEQ ID NO: 712 (2×EAAAK), SEQ ID NO: 713 (3×EAAAK), SEQ ID NO: 714 (4×EAAAK), SEQ ID NO: 715 (5×EAAAK), SEQ ID NO: 665 (6×EAAAK). In some of any embodiments, the immunomodulatory protein is a monomer and/or comprises a single polypeptide chain.

[0061] In some of any embodiments, the at least one TIM is amino-terminal to the at least one BIM in the polypeptide. In some of any embodiments, the at least one TIM is carboxy-terminal to the at least one BIM in the polypeptide.

[0062] In some of any embodiments, the immunomodulatory protein further comprises a detectable label, optionally wherein the detectable label is a Flag tag, a His tag, or a myc tag. In some of any embodiments, the immunomodulatory protein comprises the sequence of amino acids set forth in any of SEQ ID NOS: 618-623, or a sequence that exhibits at least 85% 86%, 87%, 88%, 89%, 90%, 91%, 92%, 93%, 94%, 95%, 96%, 97%, 98%, 99% or more sequence identity thereto and retains activity.

[0063] In some of any embodiments, the immunomodulatory protein comprises the sequence of amino acids set forth in any of SEQ ID NOS: 703-708, or a sequence that exhibits at least 85% 86%, 87%, 88%, 89%, 90%, 91%, 92%, 93%, 94%, 95%, 96%, 97%, 98%, 99% or more sequence identity thereto and retains activity.

[0064] In some embodiments, the TIM and the BIM are linked by a multimerization domain. In some of any embodiments, the multimerization domain promotes dimerization, trimerization, tetramerization, or pentamerization. In some of any embodiments, the multimerization domain is an immunoglobulin Fc region. In some of any embodiments, the immunomodulatory protein is a dimer. In some of any embodiments, the immunoglobulin Fc region is a homodimeric Fc region. In some of any embodiments, the immunoglobulin Fc region is a heterodimeric Fc region.

[0065] In some of any embodiments, the immunomodulatory protein is a homodimer, wherein each polypeptide of the dimer is the same. In some of any embodiments, each polypeptide comprises the at least one TIM and the at least one BIM and wherein the at least one TIM is amino-terminal to the at least one BIM in each polypeptide. In some of any embodiments, each polypeptide comprises the at least one TIM and the at least one BIM and wherein the at least one TIM is carboxy-terminal to the at least one BIM in each polypeptide.

[0066] In some of any embodiments, the immunoglobulin Fc region is an IgG2 Fc domain. In some embodiment, the IgG2 Fc domain comprises the sequence of amino acids set forth in SEQ ID NO: 729 or 853 or a sequence of amino acids that exhibits at least 95% sequence identity to SEQ ID NO:729 or 853. In some embodiments, the IgG2 Fc domain is set forth in SEQ ID NO:729. In some embodiments, the IgG2 Fc domain is set forth in SEQ ID NO: 853.

[0067] In some of any embodiments, the immunoglobulin Fc region is an IgG4 Fc domain. In some of any embodiments the IgG4 Fc domain is a variant IgG4 Fc domain comprising the amino acid substitution S228P. In some embodiemnts, the IgG4 Fc domain comprises the sequence of amino acids set forth in SEQ ID NO: 731 or 854, or a sequence of amino acids that exhibits at least 95% sequence identity to SEQ ID NO: 731 or 854. In some embodiments, the IgG4 Fc domain is set forth in SEQ ID NO:731. In some embodiments, the IgG4 Fc domain is set forth in SEQ ID NO: 854.

[0068] In some of any embodiments, the immunoglobulin Fc is an IgG1 Fc domain, or is a variant Fc that exhibits reduced binding affinity to an Fc receptor and/or reduced effector function, optionally as compared to a wild-type IgG1 Fc domain. In some embodiments, the immunoglobulin Fc is an IgG1 Fc domain and the Fc includes the amino acid sequence set forth in SEQ ID NO: 597. In some of any embodiments, the immunoglobulin Fc is an IgG4 Fc domain, either wild type or modified.

[0069] In some of any embodiments, the immunoglobulin Fc is a variant IgG1 Fc domain containing one or more amino acid substitutions selected from L234A, L234V, L235A, L235E, G237A, S267K, R292C, N297G, and V302C, by EU numbering. In some of any embodiments, the immunoglobulin Fc region contains the amino acid substitutions L234A, L235E an G237A by EU numbering or the amino acid substitutions R292C, N297G and V302C by EU numbering. In some embodiments, the Fc is a variant Fc including the amino acid sequence set forth in SEQ ID NO:589. In some embodiments, the Fc is a variant Fc including the amino acid sequence set forth in SEQ ID NO: 855.

[0070] In some embodiments, the immunomodulatory protein is a BCMA-Fc fusion proteion. In some of any embodiments, the BCMA-Fc fusion protein comprises the structure: BCMA polypeptide (BCMA)-Linker-Fc region. In some embodiments, the BCMA-Fc fusion protein is set forth in SEQ ID NO:629.

[0071] Also provided herein is an immunomodulatory BCMA-Fc fusion protein that is a homodimer comprising two identical copies of the BCMA-Fc fusion protein set forth in SEQ ID NO: 629 linked by a covalent disulfide bond.

[0072] In some of any embodiments, the immunomodulatory protein is a BCMA-Fc fusion protein that has the structure: (BCMA)-Linker-Fc region-Linker-(BCMA). In some embodiments, the BCMA-Fc fusion protein is set forth in SEQ ID NO: 809. In some embodiments, the BCMA-Fc fusion protein is set forth in SEQ ID NO: 812.

[0073] In some of any embodiments, the BCMA-Fc fusion protein has the structure: (BCMA)-Linker-(BCMA)-Linker-Fc region. In some embodiments, the BCMA-Fc fusion protein is set forth in SEQ ID NO: 813.

[0074] In some of any embodiments, the immunomodulatory protein that contains at least one TIM and at least one BIM comprises the sequence of amino acids set forth in any of SEQ ID NOS: 610-617, 624-627, 637, 638, 643, 644, 648, 653 and 654, or a sequence that exhibits at least 85% 86%, 87%, 88%, 89%, 90%, 91%, 92%, 93%, 94%, 95%, 96%, 97%, 98%, 99% or more sequence identity thereto and retains activity.

[0075] In some embodiments, the TIM is a wild-type CTLA-4 extracellular domain or a binding portion thereof, and the BIM is a TACI extracellular domain or a binding portion thereof comprising amino acid substitutions K77E/F78Y/Y102D, Q75E/R84Q, or R84G, corresponding to positions set forth in SEQ ID NO: 709. In some embodiments, the TIM is set forth in SEQ ID NO:1 and the BIM is set forth in SEQ ID NO:535, 541, 542, or 688. In some embodiemnts, the immunomodulatory protein comprises the sequence set forth in SEQ ID NO:611, SEQ ID NO:788, SEQ ID NO: 789, SEQ ID NO: 790, or SEQ ID NO: 792.

[0076] Provided herein is an immunomodulatory protein that is a homodimer comprising two identical copies of the Fc fusion protein set forth in SEQ ID NO: 611 linked by a covalent disulfide bond.

[0077] Provided herein is an immunomodulatory protein that is a homodimer comprising two identical copies of the Fc fusion protein set forth in SEQ ID NO: 788 linked by a covalent disulfide bond.

[0078] Provided herein is an immunomodulatory protein that is a homodimer comprising two identical copies of the Fc fusion protein set forth in SEQ ID NO: 789 linked by a covalent disulfide bond.

[0079] Provided herein is an immunomodulatory protein that is a homodimer comprising two identical copies of the Fc fusion protein set forth in SEQ ID NO: 790 linked by a covalent disulfide bond.

[0080] Provided herein is an immunomodulatory protein that is a homodimer comprising two identical copies of the Fc fusion protein set forth in SEQ ID NO: 792 linked by a covalent disulfide bond.

[0081] In some of any embodiments, the TIM is a wild-type CTLA-4 extracellular domain or a binding portion thereof, and the BIM is a truncated TACI extracellular domain comprising the CRD2 domain. In some embodiments, the TIM is set forth in SEQ ID NO:1 and the BIM is set forth in SEQ ID NO:528. In some embodiments, the immunomodulatory protein comprises the sequence set forth in SEQ ID NO:759, SEQ ID NO: 853, SEQ ID NO: 854 or SEQ ID NO: 791.

[0082] Provided herein is an immunomodulatory protein that is a homodimer comprising two identical copies of the Fc fusion protein set forth in SEQ ID NO: 759 linked by a covalent disulfide bond.

[0083] Provided herein is an immunomodulatory protein that is a homodimer comprising two identical copies of the Fc fusion protein set forth in SEQ ID NO: 853 linked by a covalent disulfide bond.

[0084] Provided herein is an immunomodulatory protein that is a homodimer comprising two identical copies of the Fc fusion protein set forth in SEQ ID NO: 854 linked by a covalent disulfide bond.

[0085] Provided herein is an immunomodulatory protein that is a homodimer comprising two identical copies of the Fc fusion protein set forth in SEQ ID NO: 791 linked by a covalent disulfide bond.

[0086] In some of any embodiments, the TIM is a CTLA-4 extracellular domain or a binding portion thereof, comprising amino acid substitutions G29W/L98Q/Y105L corresponding to positions set forth in SEQ ID NO:1, and the BIM is a TACI extracellular domain or a binding portion thereof comprising amino acid substitutions K77E/F78Y/Y102D, Q75E/R84Q, or R84G, corresponding to positions set forth in SEQ ID NO:709. In some embodiments, the TIM is set forth in SEQ ID NO: 186 and the BIM is set forth in SEQ ID NO:535, 541, 542, or 688. In some embodiments, the immunomodulatory protein comprises he sequence set forth in SEQ ID NO:610.

[0087] Provided herein is an immunomodulatory protein comprising two identical copies of the Fc fusion protein set forth in SEQ ID NO: 610 linked by a covalent disulfide bond.

[0088] In some of any embodiments, the immunomodulatory protein that contains at least one TIM and at least one BIM comprises the sequence of amino acids set forth in any of SEQ ID NOS: 601-609, 631-636, 645-647, 649-652, 655-659, or a sequence that exhibits at least 85% 86%, 87%, 88%, 89%, 90%, 91%, 92%, 93%, 94%, 95%, 96%, 97%, 98%, 99% or more sequence identity thereto and retains activity.

[0089] In some of any embodiments, the TIM is a wild-type CTLA-4 extracellular domain or a binding portion thereof, and the BIM is a BCMA extracellular domain or a binding portion thereof comprising the amino acid substitution H19L corresponding to positions set forth in SEQ ID NO:710. In some embodiments, the TIM is set forth in SEQ ID NO:1 and the BIM is set forth in SEQ ID NO:406. In some embodiments, the immunomodulatory protein comprises the sequence set forth in SEQ ID NO:602.

[0090] Provided herein is an immunomodulatory protein that is a homodimer comprising two identical copies of the Fc fusion protein set forth in SEQ ID NO: 602 linked by a covalent disulfide bond.

[0091] In some of any embodiments, the TIM is a CTLA-4 extracellular domain or a binding portion thereof comprising the amino acid substitutions G29W/L98Q/Y105L corresponding to positions set forth in SEQ ID NO: 1, and the BIM is a BCMA extracellular domain or a binding portion thereof comprising the amino acid substitution H19L with reference to positions set forth in SEQ ID NO:710. In some embodiments, the TIM is set forth in SEQ ID NO: 186 and the BIM is set forth in SEQ ID NO:406. In some embodiments, the immunomodulatory protein comprises the sequence set forth in SEQ ID NO:601.

[0092] Provided herein is an immunomodulatory protein that is a homodimer comprising two identical copies of the Fc fusion protein set forth in SEQ ID NO: 601 linked by a covalent disulfide bond.

[0093] In some of any embodiments, the immunomodulatory protein is a heterodimer, wherein each polypeptide of the dimer is linked to an immunoglobulin Fc domain individually containing one or more amino acid modifications in a wild-type Fc domain to effect heterodimer formation between the polypeptides. In some of any embodiments, the wild-type immunoglobulin Fc is an IgG1 Fc domain. In some of any embodiments, the one more amino acid modifications are selected from a knob-into-hole modification and a charge mutation to reduce or prevent self-association due to charge repulsion. In some of any embodiments, the Fc region further contains one or more amino acid substitutions to reduce binding affinity to an Fc receptor and/or reduce effector function, optionally as compared to a wild-type IgG1 Fc domain. In some of any embodiments, the one or more amino acid substitutions are selected from L234A, L234V, L235A, L235E, G237A, S267K, R292C, N297G, and V302C, by EU numbering. In some of any embodiments, the immunoglobulin Fc region contains the amino acid substitutions L234A, L235E an G237A by EU numbering or the amino acid substitutions R292C, N297G and V302C by EU numbering.

[0094] In some of any embodiments, the heterodimer comprises a first polypeptide containing the sequence of amino acids set forth in SEQ ID NO: 662 or 663 and a second polypeptide containing the sequence of amino acids set forth in SEQ ID NO:660.

[0095] In some of any embodiments, the immunomodulatory protein blocks binding of APRIL, BAFF, or an APRIL/BAFF heterotrimer to BCMA or TACI; and the immunomodulatory protein reduces the levels of circulating APRIL, BAFF, or an APRIL/BAFF in the blood following administration to a subject. In some of any embodiments, the immunomodulatory protein blocks binding of APRIL, BAFF, or an APRIL/BAFF heterotrimer to BCMA or TACI; or the immunomodulatory protein reduces the levels of circulating APRIL, BAFF, or an APRIL/BAFF in the blood following administration to a subject. In some of any embodiments, the immunomodulatory protein reduces or inhibits B cell maturation, differentiation and proliferation.

[0096] In some of any embodiments, the immunomodulatory protein blocks binding of CD80 or CD86 to a costimulatory receptor, optionally wherein the costimulatory receptor is CD28; and the immunomodulatory protein reduces or inhibits T cell co-stimulation. In some of any embodiments, the immunomodulatory protein reduces or inhibits B cell maturation, differentiation or proliferation. In some of any embodiments, the immunomodulatory protein blocks binding of CD80 or CD86 to a costimulatory receptor, optionally wherein the costimulatory receptor is CD28; or the immunomodulatory protein reduces or inhibits T cell costimulation.

[0097] Provided herein is a nucleic acid molecule(s) encoding the immunomodulatory protein of any of the embodiments described herein. In some of any embodiments, the nucleic acid molecule is a synthetic nucleic acid. In some of any embodiments, the nucleic acid molecule is a cDNA.

[0098] Provided herein is a vector, containing the nucleic acid molecule of any of the embodiments described herein. In some of any embodiments, the vector is an expression vector. In some of any embodiments, the vector is a mammalian expression vector or a viral vector.

[0099] Provided herein is a cell, containing the nucleic acid of any of any of the embodiments described herein or the vector of any of any of embodiments described herein. In some of any embodiments, the cell is a mammalian cell. In some of any embodiments, the cell is a human cell.

[0100] Provided herein is a method of producing an immunomodulatory protein, including introducing the nucleic acid molecule of any of the embodiments described herein or vector of any of the embodiments described herein into a host cell under conditions to express the protein in the cell. In some of any embodiments, the method includes isolating or purifying the immunomodulatory protein from the cell.

[0101] Provided herein is an immunomodulatory protein produced by the method of any of the embodiments described herein.

[0102] Provided herein is a pharmaceutical composition, including the immunomodulatory protein of any of the embodiments described herein.

[0103] Provided herein is a variant BCMA-Fc fusion protein including a variant BCMA polypeptide, an Fc region, and a linker between the BCMA polypeptide and Fc region, wherein the variant BCMA polypeptide comprises one or more amino acid substitutions in the extracellular domain (ECD) of an unmodified BCMA polypeptide or a specific binding fragment thereof corresponding to positions selected from among 9, 10, 11, 14, 16, 19, 20, 22, 25, 27, 29, 30, 31, 32, 35, 36, 39, 43, 45, 46, 47 and 48 with reference to positions set forth in SEQ ID NO:710.

[0104] In some of any embodiments, the reference BCMA polypeptide is a polypeptide consisting of the extracellular domain of BCMA or a specific binding portion thereof that binds to APRIL, BAFF, or a BAFF/APRIL heterotrimer. In some of any embodiments, the reference BCMA polypeptide comprises (i) the sequence of amino acids set forth in SEQ ID NO:710, (ii) a sequence of amino acids that has at least 95% 37a.equence identity to SEQ ID NO:710; or (iii) a portion of (i) or (ii) containing the CRD. In some of any embodiments, the reference BCMA lacks an N-terminal methionine.

[0105] In some of any embodiments, the reference BCMA polypeptide comprises (i) the sequence of amino acids set forth in SEQ ID NO:356, (ii) a sequence of amino acids that has at least 95% sequence identity to SEQ ID NO:356; or (iii) a portion of (i) or (ii) containing the CRD. In some of any embodiments, the reference BCMA polypeptide comprises the sequence set forth in SEQ ID NO:356. In some of any embodiments, the reference BCMA polypeptide consists of the sequence set forth in SEQ ID NO:356.

[0106] In some of any embodiments, the one or more amino acid substitutions are selected from S9G, S9N, S9Y, Q10E, Q10P, N11D, N11S, F14Y, S16A, H19A, H19C, H19D, H19E, H19F, H19G, H19I, H19K, H19L, H19M, H19N, H19P, H19Q, H19R, H19S, H19T, H19V, H19W, H19Y, A20T, I22L, I22V, Q25E, Q25F, Q25G, Q25H, Q25I, Q25K, Q25L, Q25M, Q25S, Q25V, Q25Y, R27H, R27L, S29P, S30G, S30Y, N31D, N31G, N31H, N31K, N31L, N31M, N31P, N31S, N31V, N31Y, T32I, T32S, L35A, L35M, L35P, L35S, L35V, L35Y, T36A, T36G, T36N, T36M, T36S, T36V, R39L, R39Q, A43E, A43S, V45A, V45D, V45I, T46A, T46I, N47D, N47Y, S48G, or a conservative amino acid substitution thereof. In some of any embodiments, the one or more amino acid substitutions comprise at least one substitution at position 19, optionally wherein the at least one substitution is selected from H19A, H19C, H19D, H19E, H19F, H19G, H19I, H19K, H19L, H19M, H19N, H19P, H19Q, H19R, H19S, H19T, H19V, H19W, H19Y. In some of any embodiments, the one or more amino acid substitution comprise at least the amino acid substitution H19L. In some of any embodiments, the one or more amino acid substitution comprise at least the amino acid substitution H19K. In some of any embodiments, the one or more amino acid substitution comprise at least the amino acid substitution H19R. In some of any embodiments, the one or more amino acid substitution comprise at least the amino acid substitution H19Y.

[0107] In some of any embodiments, the one or more amino acid substitutions comprise at least one substitution at position 25, optionally wherein the at least one substitution is selected from Q25E, Q25F, Q25G, Q25H, Q25I, Q25K, Q25L, Q25M, Q25S, Q25V, Q25Y. In some of any embodiments, the one or more amino acid substitutions comprise at least one substitution at position 31, optionally wherein the at least one substitution is selected from N31D, N31G, N31H, N31K, N31L, N31M, N31P, N31S, N31V, N31Y.

[0108] In some of any embodiments, the one or more amino acid substitutions comprise at least one substitution at position 35, optionally wherein the at least one substitution is selected from L35A, L35M, L35P, L35S, L35V, L35Y. In some of any embodiments, the one or more amino acid substitutions comprise at least one substitution at position 36, optionally wherein the at least one substitution is selected from T36A, T36G, T36N, T36M, T36S, T36V. In some of any embodiments, the one or more amino acid substitutions are H19Y/S30G; H19Y/V45A; F14Y/H19Y; H19Y/V45D; H19Y/A43E; H19Y/T36A; H19Y/I22V; N11D/H19Y; H19Y/T36M; N11S/H19Y; H19Y/L35P/T46A; H19Y/N47D; S9D/H19Y; H19Y/S30G/V45D; H19Y/R39Q; H19Y/L35P; S9D/H19Y/R27H; Q10P/H19Y/Q25H; H19Y/R39L/N47D; N11D/H19Y/N47D; H19Y/T32S; N11S/H19Y/S29P; H19Y/R39Q/N47D; S16A/H19Y/R39Q; S9N/H19Y/N31K/T46I; H19Y/R27L/N31Y/T32S/T36A; N11S/H19Y/T46A; H19Y/T32I; S9G/H19Y/T36S/A43S; H19Y/S48G; S9N/H19Y/I22V/N31D; S9N/H19Y/Q25K/N31D; S9G/H19Y/T32S; H19Y/T36A/N47Y; H19Y/V45A/T46I; H19Y/Q25K/N31D; H19Y/Q25H/R39Q/V45D; H19Y/T32S/N47D; Q10E/H19Y/A20T/T36S; H19Y/T32S/V45I; H19F/Q25E/N31L/L35Y/T36S; H19F/Q25F/N31S/T36S; H19I/Q25F/N31S/T36V; H19F/Q25V/N31M/T36S; H19Y/Q25Y/N31L/L35Y/T36S; H19F/Q25I/N31M/L35A/T36S; H19I/Q25L/N31L/L35Y/T36S; H19F/Q25L/N31G/L35P/T36A; H19Y/I22L/N31G; H19F/I22V/Q25M/N31P/T36M; H19Y/N31L/L35Y/T36S; H19L/S30G/N31H/L35A; H19L/Q25S/N31V/L35S/T36V; H19L/Q25S/S30Y/N31G/L35M/T36V; H19F/Q25F/N31L/L35Y/T36S; H19F/Q25F/N31S/T36G; H19F/I22V/Q25S/N31V/L35S/T36V; H19F/Q25G/N31S/L35V/T36N; H19L/Q25H/N31D/L35S; or H19F/Q25F/N31S/L35Y/T36S.

[0109] In some of any embodiments, the one or more amino acid substitutions comprise S16A/H19Y/R39Q. In some of any embodiments, the variant BCMA polypeptide has increased binding affinity to one or both of APRIL and BAFF compared to the reference TACI polypeptide.

[0110] In some of any embodiments, the variant BCMA polypeptide has increased binding affinity to APRIL. In some of any embodiments, the variant BCMA polypeptide has increased binding affinity to BAFF. In some of any embodiments, the variant BCMA polypeptide has increased binding affinity to APRIL and BAFF.

[0111] In some of any embodiments, the increased binding affinity for BAFF or APRIL is independently increased more than 1.2-fold, 1.5-fold, 2-fold, 3-fold, 4-fold, 5-fold, 6-fold, 7-fold, 8-fold, 9-fold, 10-fold, 20-fold, 30-fold, 40-fold, 50-fold or 60-fold. In some of any embodiments, the variant BCMA polypeptide comprises the sequence set forth in any one of SEQ ID NOS: 357-435. In some of any embodiments, the variant BCMA polypeptide consists or consists essentially of the sequence set forth in any one of SEQ ID NOS: 357-435. In some of any embodiments, the variant BCMA polypeptide consists or consists essentially of the sequence set forth in SEQ ID NO: 381. In some of any embodiments, the variant BCMA polypeptide consists or consists essentially of the sequence set forth in SEQ ID NO:411. In some of any embodiments, the variant BCMA polypeptide consists or consists essentially of the sequence set forth in SEQ ID NO:405. In some of any embodiments, the variant BCMA polypeptide consists or consists essentially of the sequence set forth in SEQ ID NO:406.

[0112] In some of any embodiments, the linker comprises a peptide linker and the peptide linker is selected from GSGGS (SEQ ID NO: 592), GGGGS (G4S; SEQ ID NO: 593), GSGGGGS (SEQ ID NO: 590), GGGGSGGGGS (2×GGGGS; SEQ ID NO: 594), GGGGSGGGGSGGGGS (3×GGGGS; SEQ ID NO: 595), GGGGSGGGGSGGGGSGGGGS (4×GGGGS, SEQ ID NO:600), GGGGSGGGGSGGGGSGGGGSGGGGS (5×GGGGS, SEQ ID NO: 671), GGGGSSA (SEQ ID NO: 596) or combinations thereof.

[0113] In some of any embodiments, the Fc fusion protein is a dimer. In some of any embodiments, the immunoglobulin Fc region is a homodimeric Fc region.

[0114] In some of any embodiments, the immunoglobulin Fc is an IgG1 Fc domain, or is a variant Fc that exhibits reduced binding affinity to an Fc receptor and/or reduced effector function, optionally as compared to a wild-type IgG1 Fc domain. In some embodiments, the immunoglobulin Fc is an IgG1 Fc domain and the Fc includes the amino acid sequence set forth in SEQ ID NO: 597. In some of any embodiments, the immunoglobulin Fc is a variant IgG1 Fc domain containing one or more amino acid substitutions selected from L234A, L234V, L235A, L235E, G237A, S267K, R292C, N297G, and V302C, by EU numbering. In some of any embodiments, the immunoglobulin Fc region contains the amino acid substitutions L234A, L235E an G237A by EU numbering or the amino acid substitutions R292C, N297G and V302C by EU numbering.

[0115] In some of any embodiments, the immunoglobulin Fc is set forth in SEQ ID NO:586. In some embodiments, the Fc is a variant Fc comprising the amino acid sequence set forth in SEQ ID NO:589. In some embodiments, the Fc fusion protein is a homodimer.

[0116] In some embodiments, the Fc fusion protein neutralizes APRIL and BAFF. In some embodiments, the IC50 for neutralizing APRIL is less than 100 pM, less than 50 pM, less than 40 pM, less than 30 pM, less than 20 pM, less than 10 pM, less than 5 pM or less than 1 pM, or is any value between any of the foregoing; and/or the IC50 for neutralizing BAFF is less than 400 pM, less than 300 pM, less than 200 pM, less than 100 pM, less than 75 pM, less than 50 pM, less than 25 pm, or less than 10 pM, or is any value between any of the foregoing.

[0117] In some of any embodiments, the Fc fusion protein blocks binding of APRIL, BAFF, or an APRIL/BAFF heterotrimer to BCMA or TACI; and the Fc fusion protein reduces the levels of circulating APRIL, BAFF, or an APRIL/BAFF in the blood following administration to a subject. In some of any embodiments, the immunoglobulin Fc is set forth in SEQ ID NO:586. In some of any embodiments, the Fc fusion protein blocks binding of APRIL, BAFF, or an APRIL/BAFF heterotrimer to BCMA or TACI; or the Fc fusion protein reduces the levels of circulating APRIL, BAFF, or an APRIL/BAFF in the blood following administration to a subject. In some of any embodiments, the immunomodulatory protein reduces or inhibits B cell maturation, differentiation and/or proliferation.

[0118] Provided herein is a nucleic acid molecule(s) encoding the Fc fusion protein of any of the embodiments described herein. In some of any embodiments, the nucleic acid molecule is a synthetic nucleic acid. In some of any embodiments, the nucleic acid molecule is a cDNA.

[0119] Provided herein is a vector containing the nucleic acid molecule of any of the embodiments described herein. In some of any embodiments, the vector is an expression vector. In some of any embodiments, the vector is a mammalian expression vector to a viral vector.

[0120] Provided herein is a cell, containing the nucleic acid of any of any of the embodiments described herein or the vector of any of any of any of the embodiments described herein. In some of any embodiments, the cell is a mammalian cell. In some of any embodiments, the cell is a human cell.

[0121] Provided herein is a method of producing an immunomodulatory protein, including introducing the nucleic acid molecule of any of any of the embodiments provided herein or vector of any of any of the embodiments provided herein into a host cell under conditions to express the protein in the cell. In some of any embodiments, the method further includes isolating or purifying the Fc fusion protein from the cell. Provided herein is a method of producing an Fc fusion protein, including introducing the nucleic acid molecule of any of the embodiments provided herein or vector of any of the embodiments provided herein into a host cell under conditions to express the protein in the cell.

[0122] Provided herein is an Fc fusion protein produced by the method of any of the embodiments described herein.

[0123] Provided herein is a pharmaceutical composition, including the Fc fusion protein of any of any of the embodiments described herein. In some of any embodiments, the pharmaceutical composition contains a pharmaceutically acceptable excipient. In some of any embodiments, the pharmaceutical composition is sterile.

[0124] Provided herein is an article of manufacture including the pharmaceutical composition of any of the embodiments described herein in a vial or container. In some of any embodiments, the vial or container is sealed.

[0125] Provided herein is a kit including the pharmaceutical composition of any of any of the embodiments provided herein and instructions for use. In some of any embodiments, the kit includes the article of manufacture of any of the embodiments described herein and instructions for use.

[0126] Provided herein is a method of reducing an immune response in a subject, including administering the immunomodulatory protein of any of the embodiments described herein to a subject in need thereof.

[0127] Provided heroine is a method of reducing an immune response in a subject, including administering the Fc fusion protein of any of the embodiments described herein to a subject in need thereof.

[0128] Provided herein is a method of reducing an immune response in a subject, including administering the pharmaceutical composition of any of any of the embodiments described herein to a subject in need thereof. In some of any embodiments, a B cell immune response is reduced in the subject, whereby B cell maturation, differentiation and/or proliferation is reduced or inhibited. In some of any embodiments, circulating levels of APRIL, BAFF or an APRIL/BAFF heterotrimer are reduced in the subject.

[0129] Provided herein is a method of reducing circulating levels of APRIL, BAFF or an APRIL/BAFF heterotrimer in a subject including administering the pharmaceutical composition of any of any of the embodiments described herein to the subject. In some of any embodiments, a T cell immune response is reduced in the subject, whereby T cell co-stimulation is reduced or inhibited. In some of any embodiments, reducing the immune response treats a disease or condition in the subject.

[0130] Provided herein is a method of treating a disease, disorder or condition in a subject, including administering the immunomodulatory protein of any of any of the embodiments described herein to a subject in need thereof.

[0131] Provided herein is a method of treating a disease, disorder or condition in a subject, including administering the Fc fusion protein of any of any of the embodiments described herein to a subject in need thereof.

[0132] Provided herein is a method of treating a disease, disorder or condition in a subject, including administering the pharmaceutical composition of any of any of the embodiments described herein to a subject in need thereof.

[0133] Also provided herein are any of the immunomodulatory proteins or pharmaceutical compositions containing same for use in treating a disease, disorder or condition in a subject. Also provided herein are uses of any of the immunomodulatory proteins or pharmaceutical compositions containing same for formulation of a medicament for treating a disease, disorder or condition in a subject.

[0134] In some of any embodiments, the disease, disorder or condition is an autoimmune disease, an inflammatory condition, a B cell cancer, an antibody-mediated pathology, a renal disease, a graft rejection, graft versus host disease, or a viral infection. The disease or condition that is treated may be any as described herein. In some of any embodiments, the disease or condition is an autoimmune disease selected from the group consisting of Systemic lupus erythematosus (SLE); Sjögren's syndrome, scleroderma, Multiple sclerosis, diabetes, polymyositis, primary biliary cirrhosis, IgA nephropathy, optic neuritis, amyloidosis, antiphospholipid antibody syndrome (APS), autoimmune polyglandular syndrome type II (APS II), autoimmune thyroid disease (AITD), Graves' disease, autoimmune adrenalitis and pemphigus vulgaris. In some of any embodiments, the disease or condition is a B cell cancer and the cancer is myeloma. In some of any embodiments, the type of myeloma includes multiple myeloma, plasmacytoma, multiple solitary plasmacytoma, and/or extramedullary myeloma. In some of any embodiments, the type of myeloma includes light chain myeloma, nonsecretory myeloma, and/or IgD or IgE myeloma.

### BRIEF DESCRIPTION OF THE DRAWINGS

[0135] FIG. 1 shows a schematic representation of a functional inhibition assay involving recombinant APRIL and BAFF by BCMA or TAC. In the assay, Jurkat cells transduced with a luciferase-based NF-κB reporter and to stably express mouse or human TACI on the cell-surface expression. Following activation by recombinant APRIL or BAFF, endogenous NF-κB transcription factors bind to the DNA response elements controlling transcription of a firefly luciferase gene. Luciferase expression can be monitored, such as by detection with Bio-Glo™ reagent and measurement using a Cytation 3 reader.

[0136] FIG. 2 shows exemplary human BCMA TD Fc fusion molecules for blockade of human APRIL (top panel) and BAFF (bottom panel) mediated signaling. Exemplary BCMA TD Fc fusions were incubated with APRIL (2 nM) or BAFF (4 nM) for 20 mins (room temperature with shaking) and then added to wells containing 150,000 Jurkat/TACI/NFκB-luciferase cells for 5 hours.

[0137] FIGS. 3A-3B show function of exemplary BCMA TD Fc fusion molecules alone or when stacked with CTLA-4 IgD for blockade of APRIL (top panel of each FIG) or BAFF (bottom panel of each FIG). FIG. 3A and FIG. 3B show human BCMA TDs retain function when stacked with CTLA-4.

[0138] FIGS. 3C-3D show function of exemplary TACI TD Fc fusion molecules when stacked with CTLA-4 IgD for blockade of APRIL (top panel of each FIG) or BAFF (bottom panel of each FIG). FIG. 3C and FIG. 3D show human TACI TDs retain function when stacked with CTLA-4.

[0139] FIG. 4 shows human BCMA fusion molecules alone or BCMA or TACI TD Fc fusion molecules when stacked with CTLA-4 IgD for blockade of mouse APRIL (left panel) and BAFF (right panel) mediated signaling.

[0140] FIG. 5A shows human BCMA TD Fc fusion molecules alone or when stacked with CTLA-4 IgD for blockade of human APRIL (top panel) and BAFF (bottom panel) mediated signaling relative to TACI 13-118-Fc, TACI 30-110-Fc, and belimumab.

[0141] FIG. 5B shows human TACI TD Fc fusion molecules when stacked with CTLA-4 IgD for blockade of human APRIL (tope panel) and BAFF (bottom panel) mediated signaling relative to TACI 13-118-Fc, TACI 30-110-Fc, and belimumab.

[0142] FIG. 6 shows a schematic representation of a functional inhibition assay of CD80/CD86-CD28 mediated costimulation. Jurkat/IL-2 cells stably express a luciferase reporter driven by the IL-2 promoter when stimulated with anti-CD3 and an anti-CD28 stimulus. Receptor-mediated signaling results in IL-2 promoter-mediated luminescence, and bioluminescent signal can be detected and quantified, such as by using Bio-Glo™ substrate and a luminometer.

[0143] FIG. 7A and FIG. 7B shows wild type or CTLA-4 vIgDs (IgSF domain) maintain function for blockade of CD80 (left panel) or CD86 (right panel) when included in multi-specific (stack) construct molecules with BCMA to TACI TDs.

[0144] FIGS. 8A-8F show activity of CTLA-4 vIgD alone or when included in multi-specific (stack) molecules with BCMA or TACI TDs for inhibiting human follicular helper T (T_{FH}) and B-cells in an autologous T_{FH}-B cell assay. B-Tfh cell cultures were incubated for 7 days in the presence of titrated (100,000-32 pM) protein. Cultured cells were surface stained and analyzed by flow cytometry for: (FIG. 8A) CD4+ T cell recovery, (FIG. 8B) CD4+CD40L+ cell recovery, (FIG. 8C) CD4+ICOS+ cell recovery, (FIG. 8D) CD19+ B cell recovery, and (FIG. 8E) B cell activation/upregulation of CD86. Supernatants were collected and levels of IgM secretion were determined by ELISA (FIG. 8F). Data represent an average (±SEM) of three replicates for each condition.

[0145] FIG. 9 shows anti-KLH IgM antibody levels in serum at termination (Day 19) in a KLH immunization model. Statistical differences between each group were determined by 1-way ANOVA; only significant differences (p<0.05) are listed.

[0146] FIG. 10 shows anti-KLH IgG1 antibody levels in serum at termination (Day 19) in a KLH immunization model. Statistical differences between each group were determined by 1-way ANOVA; only significant differences (p<0.05) are listed.

[0147] FIG. 11 shows spleen weight at termination (Day 19) in the KLH model. Statistical differences between the Fc control and other test articles were determined by t-test; only significant (p<0.05) differences are listed.

[0148] FIGS. 12A-12H show flow cytometry analyses of splenocyte B cell and Tfh subsets at termination (Day 19) in the KLH model. Spleens were processed and analyzed by flow cytometry for B220+ B cells (FIG. 12A, FIG. 12E); Marginal Zone (MZ) B cells (FIG. 12B, FIG. 12F); Germinal Center (GC) B cells (FIG. 12C, FIG. 12G); T Follicular Helper (Tfh) cells (FIG. 12D, FIG. 12H). ‘Fc control’=Fc set forth in SEQ ID NO:589. Statistically significant differences (p<0.05) vs. Fc control or abatacept were calculated by 1-way ANOVA with uncorrected Fisher's LSD test.

[0149] FIGS. 13A-13D show flow cytometry analyses of splenocyte T effector memory subsets at termination (Day 19) in a KLH model. Spleens were processed and analyzed by flow cytometry for CD4+(FIG. 13A, FIG. 13C) and CD8⁺ (FIG. 13B, FIG. 13D) T effector memory (Tₑₘ) cells. ‘Fc control’=Fc set forth in SEQ ID NO:589. Statistically significant differences (p<0.05) vs. Fc control or abatacept were calculated by 1-way ANOVA with uncorrected Fisher's LSD.

[0150] FIGS. 14A-14I show analysis of parameters assessed in an NZB/NZW murine model of human SLE. Proteinuria scores (FIG. 14A), mean percent change in body weight (FIG. 14B), and percent survival (FIG. 14C) were assessed starting at 20 weeks of age. Serum was analyzed for anti-double stranded DNA IgG titers (FIG. 14D) and blood urea nitrogen (BUN) (FIG. 14E) (** vs Fc by Uncorrected Dunn's test, p=0.0047 and p=0.0065; *** vs Fc by Uncorrected Dunn's test, p=0.0004). Kidneys were processed and analyzed by histology in replicate Periodic acid-Schiff (PAS)-stained sections, with individual component and total histology scores depicted in FIG. 14F. Frozen kidneys were also sectioned and stained for immunohistochemical analysis of mouse IgG and complement C3 glomerular deposition, as shown in FIG. 14G and FIG. 14H, respectively. FIG. 14I shows the histological score ±SEM.

[0151] FIG. 15 depicts a schematic representations of an exemplary BCMA-Fc fusion protein.

[0152] FIG. 16 depicts schematic representations of exemplary Fc fusion formats of provided multi-domain (stack) immunomodulatory proteins.

[0153] FIG. 17A and FIG. 17B depict exemplary sequence alignments to identify corresponding residues in a sequence compared to a reference sequence. The symbol “*” between two aligned amino acid indicates that the aligned amino acids are identical. The symbol “−” indicates a gap in the alignment. Exemplary, non-limiting positions for amino acid substitution described herein are indicated with bold text. Based on the alignment of two similar sequences having identical residues in common, a skilled artisan can identify “corresponding” positions in a sequence by comparison to a reference sequence using conserved and identical amino acid residues as guides. FIG. 17A provides an exemplary alignment of a reference TACI extracellular domain sequence set forth in SEQ ID NO:709 (containing the full extracellular domain with a CRD1 and CRD2 and an initiating methionine residue) with a TACI extracellular domain sequence set forth in SEQ ID NO:528 (containing only a single CRD, CRD2); aligning identical residues demonstrates, for example, that amino acid residue E7 in SEQ ID NO:528 corresponds to residue E74 in SEQ ID NO: 709, amino acid residue K10 in SEQ ID NO: 528 corresponds to residue K77 in SEQ ID NO:709, amino acid residue Y12 in SEQ ID NO: 528 corresponds to Y79 in SEQ ID NO:709, amino acid residue L15 in SEQ ID NO:528 corresponds to L82 in SEQ ID NO:709, amino acid residue R17 in SEQ ID NO: 528 corresponds to R84 in SEQ ID NO:709; and amino acid residue D16 in SEQ ID NO:528 correspond to D85 in SEQ ID NO:709. FIG. 17B provides an exemplary alignment of a reference BCMA extracellular domain sequence set forth in SEQ ID NO:710 (containing the full extracellular domain with a CRD and an initiating methionine residue) with a BCMA extracellular domain sequence set forth in SEQ ID NO:356 (without the initiating methionine); aligning identical residues demonstrates, for example, that amino acid residue H18 in SEQ ID NO:356 corresponds to residue H19 in SEQ ID NO: 710, and amino acid residue R38 in SEQ ID NO:356 corresponds to residue R39 in SEQ ID NO: 710. It is within the level of a skilled artisan to carry out similar alignments between two similar protein sequences to identify corresponding residues, including based on the exemplification and description herein.

[0154] FIGS. 18A-18D show analysis of parameters assessed murine keyhole limpet hemocyanin (KLH) model. Serum-KLH IgM OD levels were assessed as primary response (FIG. 18A) and secondary response (FIG. 18B). Similarly, serum anti-KLH IgG1 OD levels were assessed as both primary response (FIG. 18C) and secondary response (FIG. 18D).

[0155] FIGS. 19A-19B shown analysis of harvested spleen assessed from the murine keyhole limpet hemocyanin (KLH) immunization model. Spleens were processed and analyzed by weight (FIG. 19A) as well as total cell number (FIG. 19B).

[0156] FIG. 20 depicts analysis of spleens assessed for cellular subtype population makeup from the murine keyhole limpet hemocyanin (KLH) model and shows results of B cell subset numbers relative to the group mean.

[0157] FIG. 21 depicts analysis of spleens assessed for cellular subtype phenotype makeup from the murine keyhole limpet hemocyanin (KLH) model and shows results for numbers of germinal center B cells and plasma cells (FIG. 21).

[0158] FIGS. 22A-22D depict T cell numbers in the murine keyhole limpet hemocyanin (KLH) model. The splenic CD3+, CD8+, CD4+ and Follicular Helper T cells are depicted in FIG. 22A, FIG. 22B, FIG. 22C, and FIG. 22D, respectively.

[0159] FIG. 23 depicts Tcm and Tem cellular populations in the murine keyhole limpet hemocyanin (KLH) model.

[0160] FIGS. 24A-24B and FIGS. 25A-25B depict overall incidence and degree of sialadenitis (FIGS. 24A-24B) and insulitis (FIGS. 25A-25B) in diabetes-prone mice after treatment with 186-CTLA-4 Fc and CTLA4 186-GSG4S-Fc-(G4S)4-TACI 541 tested molecules.

[0161] FIG. 26 depicts mean blood glucose concentrations (mg/dL) as measured in the blood on Days 7, 8, 9 and 10 in diabetes-prone mice after treatment with 186-CTLA-4 Fc and CTLA4 186-GSG4S-Fc-(G4S)4-TACI 541 tested molecules.

[0162] FIG. 27 and FIGS. 28A-28C depict results from an in vivo murine bm12 inducible SLE model tested with an exemplary CTLA4 186-GSG4S-Fc-(G4S)4-TACI 541 multi-domain molecule, and compared to a WT-TACI Fc only. The BUN concentrations from serum collected at day 82 (study termination) are shown in FIG. 27. FIGS. 28A-28C depicts levels of IgG2b (FIG. 28A), IgG2c (FIG. 28B), and IgG3 (FIG. 28C) from serum collected from days 14, 42 and 82.

[0163] FIG. 29 depicts levels of anti-dsDNA antibody levels from serum collected in an in vivo murine bm12 inducible SLE model tested with an exemplary CTLA4 186-GSG4S-Fc-(G4S)4-TACI 541 multi-domain molecule.

### DETAILED DESCRIPTION

[0164] Provided herein are immunomodulatory proteins that engage with one or more other immune receptor or ligand, e.g. on antigen-presenting cells or produced as soluble factors, to suppress or reduce B cell responses or activity and, in some cases, also T cell responses. Among the provided immunomodulatory proteins are proteins that bind to BAFF or APRIL ligands to neutralize their activity and block or antagonize the activity of B cell stimulatory receptors, such as TACI or BCMA. The provided immunomodulatory proteins may be fusion proteins of a BCMA extracellular domain or binding portion thereof (hereinafter BCMA ECD) and a multimerization domain, such as an immunoglobulin Fc. For example, provided herein are BCMA-Fc fusion proteins. Still further provided are multi-domain immunomodulatory proteins (also called “stack” immunomodulatory proteins) that contain at least one first binding domain that binds to BAFF or APRIL ligands to neutralize their activity and block or antagonize the activity of B cell stimulatory receptors, such as TACI or BCMA, and at least one second binding domain that blocks or antagonizes the activity of a T cell stimulatory receptor, such as by binding to CD80 or CD86 ligands to neutralize their activity via interactions with the T cell stimulatory receptor CD28 or negative regulatory protein CTLA-4. In some embodiments, the immunomodulatory proteins provided herein can be used for the treatment of diseases, disorders or conditions that are associated with a dysregulated immune response, such as associated with inflammatory or autoimmune symptoms including an inflammatory or autoimmune disease.

[0165] The immune system relies on immune checkpoints to prevent autoimmunity (i.e., self-tolerance) and to protect tissues from excessive damage during an immune response, for example during an attack against a pathogenic infection. In some cases, however, the immune system can become dysregulated and an abnormal immune response can be mounted against a normal body part or tissue, resulting in an autoimmune disease or condition or autoimmune symptoms. In other cases an unwanted immune response can be mounted to a foreign tissue, such as a transplant, resulting in transplant rejection.

[0166] In some aspects, immunotherapy that alters immune cell activity, such as B cell activity and/or T cell activity, can treat certain diseases, disorders and conditions in which the immune response is dysregulated. In particular, inhibition or attenuation of an immune response, such as a B cell response and/or T cell response, could be desirable to reduce or prevent unwanted inflammation, autoimmune symptoms and/or transplant rejection. Therapeutic approaches that seek to modulate interactions between ligands and their receptors that mediate an immune response, including in the immune synapse, however, are not entirely satisfactory. In some cases, therapies to intervene and alter the immunomodulatory effects of immune cell, e.g. T cell or B cell, activation are constrained by the spatial orientation requirements as well as size limitations imposed by the confines of the immunological synapse. In some aspects, existing therapeutic drugs, including antibody drugs, may not be able to interact simultaneously with the multiple target proteins involved in modulating these interactions. For example, soluble receptors and antibodies generally bind competitively (e.g., to no more than one target species at a time) and therefore lack the ability to simultaneously bind multiple targets. Additionally, pharmacokinetic differences between drugs that independently target one of these receptors can create difficulties in properly maintaining a desired blood concentration of a drug combination targeting two different targets throughout the course of treatment.

[0167] BAFF and APRIL are TNF superfamily members that bind both TACI and BCMA on B cells; BAFF also binds a 3^{rd} receptor, BAFF-R. Together, BAFF and APRIL support B cell development, differentiation, and survival. Their co-neutralization dramatically reduces B cell function, including antibody production, whereas inhibition of either BAFF or APRIL alone mediates relatively modest effects. While CTLA-4-based therapeutics that block T cell costimulation provide safe and moderately effective T cell inhibition in many disease settings, and while B cell targeting therapies have demonstrated promising therapeutic potential, they are not entirely satisfactory.

[0168] Among provided embodiments are those that provide for improved neutralizing activity and suppression or reduction of B cell responses. In some embodiments, the improved activity is mediated by increased or improved binding or interaction of the provided immunomodulatory proteins with BAFF and/or APRIL. For example, provided herein are variant BCMA polypeptides that contain one or more amino acid substitutions (replacement or mutations) that confer improved binding affinity of the protein for BAFF and/or APRIL. In particular, among provided embodiments are those that provide for improved, combined BAFF and APRIL inhibition. Further, the provided immunomodulatory proteins include those that suppress BAFF and/or APRIL mediated activity either alone (e.g. BCMA-Fc), or coupled with inhibition of T cell costimulation. For example, among the provided embodiments are multi-domain immunomodulatory protein of a B cell inhibitor molecule (BIM) that is an extracellular domain portion that binds to BAFF and/or APRIL (e.g. a BCMA ECD), fused to a T cell inhibitory molecule (TIM) that is another domain that binds to a ligand of a T cell stimulatory receptor and/or to a T cell stimulatory receptor to antagonize or block T cell responses. It is contemplated that the provided immunomodulatory proteins provide for improved activity to modulate B cell responses alone, or together with modulation of T cell response. Thus, the provided immunomodulatory proteins provide effective and durable disease suppression in the treatment of autoimmune or inflammatory diseases, including in severe B cell-related autoimmune diseases like SLE.

[0169] For example, the provided embodiments are based on findings that directed evolution by affinity modification of TNFR domain (TD) of the ectodomain of certain molecules (e.g. BCMA) facilitated the development of molecules with improved affinity for APRIL and/or BAFF. Thus, the affinity modification produces a variant BCMA that contains a variant TNFR domain (vTD). Fusion of such molecules with an immunoglobulin Fc results in immunomodulatory proteins that suppress B cell activity and response. Likewise, the provided embodiments also are based on findings that further including the TD domains, e.g. wild-type (WT) TD or vTD, as a multi-domain fusion with an immunoglobulin superfamily (IgSF) domain of a T cell inhibitiory molecule, such as a CTLA-4 extracellular domain, further potentiates immunosuppressive activity. Such activity can be further improved by directed evolution by affinity modification of the IgSF domain of CTLA-4 to produce a variant IgSF domain (vIgD) to further enhance affinity for CD80 and/CD86 ligands, which are ligands of the CD28 co-stimulatory receptor and inhibitory CTLA-4 receptor. The findings herein demonstrate these immunomodulatory proteins consistently exhibit potent immunosuppressive activity and efficacy in vitro and in vivo, appearing superior to existing and/or approved immunomodulators like belimumab, abatacept, atacicept, or telitacicept. Such biologics may therefore be attractive development candidates for the treatment of serious autoimmune and/or inflammatory diseases, including B cell-related diseases such as SLE, Sjögren's syndrome, and other connective tissue diseases.

[0170] All publications, including patent documents, scientific articles and databases, referred to in this application are incorporated by reference in their entirety for all purposes to the same extent as if each individual publication were individually incorporated by reference. If a definition set forth herein is contrary to or otherwise inconsistent with a definition set forth in the patents, applications, published applications and other publications that are herein incorporated by reference, the definition set forth herein prevails over the definition that is incorporated herein by reference.

[0171] The section headings used herein are for organizational purposes only and are not to be construed as limiting the subject matter described.

### I. Definitions

[0172] Unless defined otherwise, all terms of art, notations and other technical and scientific terms or terminology used herein are intended to have the same meaning as is commonly understood by one of ordinary skill in the art to which the claimed subject matter pertains. In some cases, terms with commonly understood meanings are defined herein for clarity and/or for ready reference, and the inclusion of such definitions herein should not necessarily be construed to represent a substantial difference over what is generally understood in the art.

[0173] As used in the specification and the appended claims, the singular forms “a,” “an,” and “the” include plural referents unless the context clearly indicates otherwise.

[0174] The term “about” as used herein refers to the usual error range for the respective value readily known to the skilled person in this technical field. Reference to “about” a value or parameter herein includes (and describes) embodiments that are directed to that value or parameter per se. For example, description referring to “about X” includes description of “X”.

[0175] The term “affinity-modified” as used in the context of a domain of a protein means a mammalian protein having an altered amino acid sequence in an extracellular domain or a specific binding portion thereof (relative to the corresponding wild-type parental or unmodified domain) such that it has an increased or decreased binding activity, such as binding affinity, to at least one of its binding partners (alternatively “counter-structures”) compared to the parental wild-type or unmodified (i.e., non-affinity modified domain) protein. In some embodiments, the affinity-modified domain can contain 1, 2, 3, 4, 5, 6, 7, 8, 9, 10, 11, 12, 13, 14, 15, 16, 17, 18, 19, 20, 21, 22, 23, 24, 25, 26, 27, 28, 29, 30 or more amino acid differences, such as amino acid substitutions, in a wild-type or unmodified domain. An increase or decrease in binding activity, e.g. binding affinity, can be determined using well known binding assays, including flow cytometry. Larsen et al., American Journal of Transplantation, Vol 5: 443-453 (2005). See also, Linsley et al., Immunity, 1: 7930801 (1994). An increase in a protein's binding activity, e.g. affinity, to its binding partner(s) is to a value at least 10% greater than that of the wild-type control and in some embodiments, at least 20%, 30%, 40%, 50%, 100%, 200%, 300%, 500%, 1000%, 5000%, or 10000% greater than that of the wild-type control value. A decrease in a protein's binding activity, e.g. affinity, to at least one of its binding partner is to a value no greater than 90% of the control but no less than 10% of the wild-type control value, and in some embodiments no greater than 80%, 70% 60%, 50%, 40%, 30%, or 20% but no less than 10% of the wild-type control value. An affinity-modified protein is altered in primary amino acid sequence of the extracellular domain or a specific binding portion thereof by substitution, addition, or deletion of amino acid residues. The term “affinity-modified” is not be construed as imposing any condition for any particular starting composition or method by which the affinity-modified protein was created. Thus, an affinity-modified protein is not limited to wild-type protein domains that are then transformed to an affinity-modified domain by any particular process of affinity modification. An affinity-modified domain polypeptide can, for example, be generated starting from wild-type mammalian domain sequence information, then modeled in silico for binding to its binding partner, and finally recombinantly or chemically synthesized to yield the affinity-modified domain composition of matter. In but one alternative example, an affinity-modified domain can be created by site-directed mutagenesis of a wild-type domain. Thus, affinity modified IgSF domain or an affinity modified TD domain denotes a product and not necessarily a product produced by any given process. A variety of techniques including recombinant methods, chemical synthesis, or combinations thereof, may be employed.

[0176] The term “affinity-modified IgSF domain” refers to an affinity-modified domain of a member of the immunoglobulin superfamily (IgSF) protein having an altered amino acid sequence of an immunoglobulin domain (e.g. IgV) within the extracellular domain of the IgSF protein or a specific binding portion thereof (relative to the corresponding wild-type parental or unmodified domain) such that it has an increased or decreased binding activity, such as binding affinity, to at least one of its binding partners (alternatively “counter-structures”) compared to the parental wild-type or unmodified protein containing the non-affinity modified or unmodified IgSF domain.

[0177] The term “affinity-modified TD domain” refers to an affinity-modified domain of a member of the tumor necrosis receptor superfamily (TNFRSF) protein or a TNF ligand thereof having an altered amino acid sequence of a TNFR domain or of a TNF domain therein, respectively. For example, an affinity-modified TD domain of a TNFRSF protein has an altered amino acid sequence of a TNFR domain composed of at least one cysteine rich domain (CRD) within the extracellular domain of the TNFRSF protein or a specific binding portion thereof (relative to the corresponding wild-type parental or unmodified domain) such that it has an increased or decreased binding activity, such as binding affinity, to at least one of its binding partners (alternatively “counter-structures”) compared to the parental wild-type or unmodified protein containing the non-affinity modified or unmodified TD domain.

[0178] The term “B cell inhibitory molecule” or BIM refers to a protein molecule that antagonizes or blocks the activity of a B cell stimulatory receptor. The BIM can antagonize the activity of the B cell stimulatory receptor by binding directly to a cognate ligand of the B cell stimulatory receptor, thereby blocking or reducing the binding between the ligand and the B cell stimulatory receptor. For example, a BIM binds to APRIL and/or BAFF, which are ligands of the B cell stimulatory receptors B cell maturation antigen (BCMA), B cell activation factor receptor (BAFF-R), and transmembrane activator and calcium modulator and cyclophilin ligand interactor (TACI). In particular embodiments, a BIM provided herein contains the extracellular domain or a portion thereof containing a TNF receptor super family domain (TD, e.g. CRD) of a B cell stimulatory receptor that binds to the cognate ligand APRIL and/or BAFF, and heterotrimers of APRIL and BAFF. For example, a BIM includes the extracellular domain of TACI, or a portion of the extracellular domain of TACI containing a TD domain that binds to cognate ligands APRIL and/or BAFF, and heterotrimers of APRIL and BAFF. In other examples, a BIM includes the extracellular domain of BCMA, or a portion of the extracellular domain of BCMA containing a TD domain that binds to cognate ligands APRIL and/or BAFF, and heterotrimers of APRIL and BAFF. A BIM also can include an affinity-modified variant of the extracellular domain or portion thereof of TACI or BCMA with one more amino acid modifications (e.g. amino acid substitutions) in the TD that increase binding affinity for the cognate ligand (e.g. APRIL and/or BAFF, and heterotrimers of APRIL and BAFF).

[0179] As used herein, a “B cell stimulatory receptor” refers to one or more of B cell maturation antigen (BCMA), B cell activation factor receptor (BAFF-R), and transmembrane activator and calcium modulatory and cyclophilin ligand interactor (TACI), which are related tumor necrosis factor (TNFR) superfamily receptors expressed on B cells. Engagement or ligation of these related receptors by their cognate ligands, BAFF and/or APRIL, or heterotrimers of APRIL and BAFF, regulate B cell homeostasis, including B cell survival, B cell maturation and differentiation and immunoglobulin class switching. A B cell stimulatory receptor generally contains an extracellular portion, a transmembrane domain and cytoplasmic region, in which the cytoplasmic region contains one or more TNF receptor associated factor (TRAF) binding sites. Recruitment of various TRAF molecules to the cytoplasmic domain can activate various transcription factors, such as NF-κB (e.g. NF-κB1 or NF-κB2), to mediate B cell signaling pathways regulating B cell homeostasis.

[0180] As used herein, “bind,” “bound” or grammatical variations thereof refers to the participation of a molecule in any attractive interaction with another molecule, resulting in a stable association in which the two molecules are in close proximity to one another. Binding includes, but is not limited to, non-covalent bonds, covalent bonds (such as reversible and irreversible covalent bonds), and includes interactions between molecules such as, but not limited to, proteins, nucleic acids, carbohydrates, lipids, and small molecules, such as chemical compounds including drugs.

[0181] As used herein, binding activity refer to characteristics of a molecule, e.g. a polypeptide, relating to whether or not, and how, it binds one or more binding partners. A binding activity can include any measure of binding of one molecule for a binding partner. Binding activities include the ability to bind the binding partner(s), the affinity with which it binds to the binding partner (e.g. high affinity), the avidity with which it binds to the binding partner, the strength of the bond with the binding partner and/or specificity or selectivity for binding with the binding partner.

[0182] The term “binding affinity” as used herein means the specific binding affinity of a protein for its binding partner (i.e., its counter-structure) under specific binding conditions. The binding affinity refers to the strength of the interaction between two or more molecules, such as binding partners, typically the strength of the noncovalent interactions between two binding partners. An increase or attenuation in binding affinity of an affinity-modified domain, or an immunomodulatory protein containing an affinity-modified domain, to a binding partner is determined relative to the binding affinity of the unmodified domain (e.g., the native or wild-type IgSF domain or the native or wild-type TD domain). Methods for determining binding affinity, or relative binding affinity, are known in art, solid-phase ELISA immunoassays, ForteBio Octet, Biacore measurements or flow cytometry. See, for example, Larsen et al., American Journal of Transplantation, vol. 5: 443-453 (2005); Linsley et al., Immunity, Vol 1 (9): 793-801 (1994). In some embodiments, binding affinity can be measured by flow cytometry, such as based on a Mean Fluorescence Intensity (MFI) in a flow binding assay.

[0183] The term “binding avidity” as used herein means the specific binding avidity, of a protein for its binding partner (i.e., its counter-structure) under specific binding conditions. In biochemical kinetics avidity refers to the accumulated strength of multiple affinities of individual non-covalent binding interactions, such as between a protein for its binding partner (i.e., its counter-structure). As such, avidity is distinct from affinity, which describes the strength of a single interaction.

[0184] The term “biological half-life” refers to the amount of time it takes for a substance, such as an immunomodulatory protein, to lose half of its pharmacologic or physiologic activity or concentration. Biological half-life can be affected by elimination, excretion, degradation (e.g., enzymatic degradation/digestion) of the substance, or absorption and concentration in certain organs or tissues of the body. In some embodiments, biological half-life can be assessed by determining the time it takes for the blood plasma concentration of the substance to reach half its steady state level (“plasma half-life”). Conjugates that can be used to derivatize and increase the biological half-life of a protein are known in the art and include, but are not limited to, multimerization domains (e.g. Fc immunoglobulin domain), polyethylene glycol (PEG), hydroxyethyl starch (HES), XTEN (extended recombinant peptides; see, WO2013130683), human serum albumin (HSA), bovine serum albumin (BSA), lipids (acylation), and poly-Pro-Ala-Ser (PAS), polyglutamic acid (glutamylation).

[0185] The term “cell surface counter-structure” (alternatively “cell surface binding partner”) as used herein is a counter-structure (alternatively is a binding partner) expressed on a mammalian cell. Typically, the cell surface binding partner is a transmembrane protein. In some embodiments, the cell surface binding partner is a receptor.

[0186] The terms “binding partner” or “counter-structure” in reference to a protein, such as a receptor, soluble ligand, or to an extracellular domain or portion thereof or affinity-modified variant thereof, refers to at least one molecule (typically a native mammalian protein) to which the referenced protein specifically binds under specific binding conditions. In some aspects, an affinity-modified domain, or an immunomodulatory protein containing an affinity-modified domain, specifically binds to the binding partner of the corresponding domain of the native or wild-type protein but with increased or attenuated affinity. A “cell surface binding partner” is a binding partner expressed on a mammalian cell. Typically, the cell surface binding partner is a transmembrane protein. In some embodiments, the cell surface binding partner is a receptor or a ligand of a receptor expressed on and by cells, such as mammalian cells, forming the immunological synapse, for example immune cells.

[0187] The term “cis” with reference to binding to cell surface molecules refers to binding to two or more different cell surface molecules, each of which is present on the surface of the same cell. In some embodiments, cis means that the two or more cell surface molecules are exclusively on one or exclusively the other (but not both) of the two mammalian cells forming the IS.

[0188] The term “conservative amino acid substitution” as used herein means an amino acid substitution in which an amino acid residue is substituted by another amino acid residue having a side chain R group with similar chemical properties (e.g., charge or hydrophobicity). Examples of groups of amino acids that have side chains with similar chemical properties include 1) aliphatic side chains: glycine, alanine, valine, leucine, and isoleucine; 2) aliphatic-hydroxyl side chains: serine and threonine; 3) amide-containing side chains: asparagine and glutamine; 4) aromatic side chains: phenylalanine, tyrosine, and tryptophan; 5) basic side chains: lysine, arginine, and histidine; 6) acidic side chains: aspartic acid and glutamic acid; and 7) sulfur-containing side chains: cysteine and methionine. Conservative amino acids substitution groups are: valine-leucine-isoleucine, phenylalanine-tyrosine, lysine-arginine, alanine-valine, glutamate-aspartate, and asparagine-glutamine.

[0189] The term, “corresponding to” with reference to positions of a protein, such as recitation that nucleotides or amino acid positions “correspond to” nucleotides or amino acid positions in a disclosed sequence, such as set forth in the Sequence Listing, refers to nucleotides or amino acid positions identified upon alignment with the disclosed sequence based on structural sequence alignment or using a standard alignment algorithm, such as the GAP algorithm. By aligning the sequences, one skilled in the art can identify corresponding residues, for example, using conserved and identical amino acid residues as guides. FIG. 17A and FIG. 17B exemplify identification of corresponding residues by aligning two sequences.

[0190] As used herein, “domain” (typically a sequence of three or more, generally 5 or 7 or more amino acids, such as 10 to 200 amino acid residues) refers to a portion of a molecule, such as a protein or encoding nucleic acid, that is structurally and/or functionally distinct from other portions of the molecule and is identifiable. For example, domains include those portions of a polypeptide chain that can form an independently folded structure within a protein made up of one or more structural motifs and/or that is recognized by virtue of a functional activity, such as binding activity. A protein can have one, or more than one, distinct domains. For example, a domain can be identified, defined or distinguished by homology of the primary sequence or structure to related family members, such as homology to motifs. In another example, a domain can be distinguished by its function, such as an ability to interact with a biomolecule, such as a cognate binding partner. A domain independently can exhibit a biological function or activity such that the domain independently or fused to another molecule can perform an activity, such as, for example binding. A domain can be a linear sequence of amino acids or a non-linear sequence of amino acids. Many polypeptides contain a plurality of domains. Such domains are known, and can be identified by those of skill in the art. For exemplification herein, definitions are provided, but it is understood that it is well within the skill in the art to recognize particular domains by name. If needed appropriate software can be employed to identify domains. It is understood that reference to amino acids, including to a specific sequence set forth as a SEQ ID NO used to describe domain organization (e.g. of an IgSF domain or a TD domain) are for illustrative purposes and are not meant to limit the scope of the embodiments provided. It is understood that polypeptides and the description of domains thereof are theoretically derived based on homology analysis and alignments with similar molecules. Also, in some cases, adjacent N- and/or C-terminal amino acids of a given domain (e.g. IgSF domain or TD) also can be included in a sequence, such as to ensure proper folding of the domain when expressed. Thus, the exact locus can vary, and is not necessarily the same for each protein. For example, a specific IgSF domain, such as specific IgV domain or IgC domain, can be several amino acids (1-10, such as 1, 2, 3, 4, 5, 6, 7, 8, 9 or 10 amino acids) longer or shorter. Likewise, a specific TD domain, such as specific CRD domain, can be several amino acids (1-10, such as 1, 2, 3, 4, 5, 6, 7, 8, 9 or 10 amino acids) longer or shorter.

[0191] The term “ectodomain,” “extracellular domain,” or “ECD,” which are used interchangeably herein, refers to a region of a membrane protein, such as a transmembrane protein, that lies outside the vesicular membrane (e.g., the space outside of a cell), when a full-length form of the membrane protein is expressed from a cell. For purposes herein, it is understood that reference to the ECD refers to sequences and domains that make up this region and do not require that a protein that contains an ECD is a membrane protein or that the domain is present outside a cell. For example, a soluble immunomodulatory protein can contain ECD sequences of a membrane protein fused to another moiety, such as a multimerization domain, for example an Fc region. Ectodomains often interact with specific ligands or specific cell surface receptors, such as via a binding domain that specifically binds to the ligand or cell surface receptor. Examples of binding domains include immunoglobulin domains (IgD, also called an IgSF domain) or cysteine rich domains (CRDs). Ectodomains of members of the immunoglobulin superfamily contain an IgD (e.g. IgV domain). Ectodomains of members of the TNFR superfamily contain a TD domain (e.g. a CRD domain). Thus reference to an ECD herein includes a full-length sequence of an ECD of a membrane protein as well as specific-binding fragments thereof containing an IgD or a CRD that bind to a ligand or cognate binding partner.

[0192] The terms “effective amount” or “therapeutically effective amount” refer to a quantity and/or concentration of a therapeutic composition, such as containing an immunomodulatory protein or Fc fusion protein, that when administered ex vivo (by contact with a cell from a patient) or in vivo (by administration into a patient) either alone (i.e., as a monotherapy) or in combination with additional therapeutic agents, yields a statistically significant inhibition of disease progression as, for example, by ameliorating or eliminating symptoms and/or the cause of the disease. An effective amount for treating a disease, condition or disorder, such as an immune system disease or disorder, may be an amount that relieves, lessens, or alleviates at least one symptom or biological response or effect associated with the disease, condition or disorder, prevents progression of the disease, condition or disorder, or improves physical functioning of the patient. In the case of cell therapy, the effective amount is an effective dose or number of cells administered to a patient. In some embodiments the patient is a human patient.

[0193] As used herein, a fusion protein refers to a polypeptide encoded by a nucleic acid sequence containing a coding sequence for two or more proteins, in some cases 2, 3, 4, 5 or more protein, in which the coding sequences are in the same reading frame such that when the fusion construct is transcribed and translated in a host cell, the protein is produced containing the two or more proteins. Each of the two or more proteins can be adjacent to another protein in the construct or separated by a linker polypeptide that contains, 1, 2, 3, or more, but typically fewer than 20, 15, 10, 9, 8, 7, or 6 amino acids. The protein product encoded by a fusion construct is referred to as a fusion polypeptide. An example of a fusion protein in accord with the provided embodiments is an Fc fusion protein containing an affinity-modified domain (e.g. a variant of a BCMA or portion thereof containing a CRD) that is linked to an immunoglobulin Fc domain.

[0194] The term “half-life extending moiety” refers to a moiety of a polypeptide fusion or chemical conjugate that extends the half-life of a protein circulating in mammalian blood serum compared to the half-life of the protein that is not so conjugated to the moiety. In some embodiments, half-life is extended by greater than or about 1.2-fold, about 1.5-fold, about 2.0-fold, about 3.0-fold, about 4.0-fold, about 5.0-fold, or about 6.0-fold. In some embodiments, half-life is extended by more than 6 hours, more than 12 hours, more than 24 hours, more than 48 hours, more than 72 hours, more than 96 hours or more than 1 week after in vivo administration compared to the protein without the half-life extending moiety. The half-life refers to the amount of time it takes for the protein to lose half of its concentration, amount, or activity. Half-life can be determined for example, by using an ELISA assay or an activity assay. Exemplary half-life extending moieties include an Fc domain, a multimerization domain, polyethylene glycol (PEG), hydroxyethyl starch (HES), XTEN (extended recombinant peptides; see, WO2013130683), human serum albumin (HSA), bovine serum albumin (BSA), lipids (acylation), and poly-Pro-Ala-Ser (PAS), and polyglutamic acid (glutamylation).

[0195] An Fc (fragment crystallizable) region or domain of an immunoglobulin molecule (also termed an Fc polypeptide) corresponds largely to the constant region of the immunoglobulin heavy chain, and which, in some cases, is responsible for various functions, including the antibody's effector function(s). The Fc domain contains part or all of a hinge domain of an immunoglobulin molecule plus a CH2 and a CH3 domain. In some cases for inclusion in a provided fusion protein, all or a portion of the Fc hinge sequence may be deleted. The Fc domain can form a dimer of two polypeptide chains joined by one or more disulfide bonds. In some embodiments, the Fc is a variant Fc that exhibits reduced (e.g. reduced greater than about 30%, 40%, 50%, 60%, 70%, 80%, 90% or more) activity to facilitate an effector function. In some embodiments, reference to amino acid substitutions in an Fc region is by EU numbering system unless described with reference to a specific SEQ ID NO. EU numbering is known and is according to the most recently updated IMGT Scientific Chart (IMGT®, the international ImMunoGeneTics information system®, http://www.imgt.org/IMGTScientificChart/Numbering/Hu_IGHGnber.html (created: 17 May 2001, last updated: 10 Jan. 2013) and the EU index as reported in Kabat, E. A. et al. Sequences of Proteins of Immunological interest. 5th ed. US Department of Health and Human Services, NIH publication No. 91-3242 (1991).

[0196] An immunoglobulin Fc fusion (“Fc-fusion”), such as an immunomodulatory Fc fusion protein, is a molecule comprising one or more polypeptides operably linked to an Fc region of an immunoglobulin. An Fc-fusion may comprise, for example, an Fc region operably linked to a TIM or BIM of the provided immunomodulatory proteins. An Fc-fusion may comprise, for example, an Fc region operably linked to a BCMA extracellular domain or portion thereof containing a CRD, including any of the provided affinity-modified variants thereof. An immunoglobulin Fc region may be linked indirectly or directly to the one or more polypeptides. Various linkers are known in the art and can optionally be used to link an Fc to a fusion partner to generate an Fc-fusion. Fc-fusions of identical species can be dimerized to form Fc-fusion homodimers. Fc fusion of non-identical species (e.g. knob into hole engineering) may be used to form Fc-fusion heterodimers. In some embodiments, the Fc is a mammalian Fc such as a murine or human Fc.

[0197] The term “host cell” refers to any cell that can be used to express a protein encoded by a recombinant expression vector. A host cell can be a prokaryote, for example, E. coli, or it can be a eukaryote, for example, a single-celled eukaryote (e.g., a yeast or other fungus), a plant cell (e.g., a tobacco or tomato plant cell), an animal cell (e.g., a human cell, a monkey cell, a hamster cell, a rat cell, a mouse cell, or an insect cell) or a hybridoma. Examples of host cells include Chinese hamster ovary (CHO) cells or their derivatives such as Veggie CHO and related cell lines which grow in serum-free media or CHO strain DX-B11, which is deficient in DHFR.

[0198] The term “immunological synapse” or “immune synapse” (abbreviated “IS”) as used herein means the interface between a mammalian cell that expresses MHC I (major histocompatibility complex) or MHC II, such as an antigen-presenting cell or tumor cell, and a mammalian lymphocyte such as an effector T cell or Natural Killer (NK) cell.

[0199] The term “immunoglobulin” (abbreviated “Ig”) as used herein is synonymous with the term “antibody” (abbreviated “Ab”) and refers to a mammalian immunoglobulin protein including any of the five human classes: IgA (which includes subclasses IgA1 and IgA2), IgD, IgE, IgG (which includes subclasses IgG1, IgG2, IgG3, and IgG4), and IgM. The term is also inclusive of immunoglobulins that are less than full-length, whether wholly or partially synthetic (e.g., recombinant or chemical synthesis) or naturally produced, including any fragment thereof containing at least a portion of the variable heavy (VH) chain and/or variable light (VL) chain region of the immunoglobulin molecule that is sufficient to form an antigen binding site and, when assembled, to specifically bind antigen. The antibody also can include all or a portion of the constant region. Such fragments include antigen binding fragment (Fab), variable fragment (Fv) containing VH and VL, the single chain variable fragment (scFv) containing VH and VL linked together in one chain, as well as other antibody V region fragments, such as Fab′, F(ab)2, F(ab′)2, dsFv diabody, Fc, and Fd polypeptide fragments. Hence, it is understood that reference to an antibody herein includes full-length antibody and antigen-binding fragments. The term antibody also includes antibody compositions with polyepitopic specificity, multispecific antibodies (e.g., bispecific antibodies), diabodies, and single-chain molecules. Bispecific antibodies, homobispecific and heterobispecific, are included within the meaning of the term. Antibodies include polyclonal antibodies or monoclonal antibodies. Antibody also includes synthetic antibodies or recombinantly produced antibodies. For the structure and properties of the different classes of antibodies, see e.g., Basic and Clinical Immunology, 8th Edition, Daniel P. Sties, Abba I. Terr and Tristram G. Parsolw (eds), Appleton & Lange, Norwalk, Conn., 1994, page 71 and Chapter 6.

[0200] The terms “full-length antibody,” “intact antibody” or “whole antibody” are used interchangeably to refer to an antibody in its substantially intact form, as opposed to an antibody fragment. A full-length antibody is an antibody typically having two full-length heavy chains (e.g., VH-CH1-CH2-CH3 or VH-CH1-CH2-CH3-CH4) and two full-length light chains (VL-CL) and hinge regions, such as antibodies produced from mammalian species (e.g. human, mouse, rat, rabbit, non-human primate, etc.) by antibody secreting B cells and antibodies with the same domains that are produced synthetically. Specifically whole antibodies include those with heavy and light chains including an Fc region. The constant domains may be native sequence constant domains (e.g., human native sequence constant domains) or amino acid sequence variants thereof. In some cases, the intact antibody may have one or more effector functions.

[0201] An “antibody fragment” comprises a portion of an intact antibody, the antigen binding and/or the variable region of the intact antibody. Antibody fragments, include, but are not limited to, Fab fragments, Fab′ fragments, F(ab′)₂ fragments, Fv fragments, disulfide-linked Fvs (dsFv), Fd fragments, Fd′ fragments; diabodies; linear antibodies (see U.S. Pat. No. 5,641,870, Example 2; Zapata et al., Protein Eng. 8(10): 1057-1062 [1995]); single-chain antibody molecules, including single-chain Fvs (scFv) or single-chain Fabs (scFab); antigen-binding fragments of any of the above and multispecific antibodies from antibody fragments.

[0202] “Fv” is composed of one heavy- and one light-chain variable region domain linked by non-covalent association. From the folding of these two domains emanate six complementarity determining regions (CDR) (3 in each from the heavy and light chain) that contribute the amino acid residues for antigen binding and confer antigen binding specificity to the antibody. However, even a single variable domain (or half of an Fv comprising only three CDRs specific for an antigen) has the ability to recognize and bind antigen, although, in some cases, at a lower affinity than the entire binding site.

[0203] “dsFv” refers to an Fv with an engineered intermolecular disulfide bond, which stabilizes the V_{H}-V_{L} pair.

[0204] An “Fd fragment” is a fragment of an antibody containing a variable domain (V_{H}) and one constant region domain (C_{H}1) of an antibody heavy chain.

[0205] A “Fab fragment” is an antibody fragment that results from digestion of a full-length immunoglobulin with papain, or a fragment having the same structure that is produced synthetically, e.g., by recombinant methods. A Fab fragment contains a light chain (containing a V_{L} and C_{L}) and another chain containing a variable domain of a heavy chain (V_{H}) and one constant region domain of the heavy chain (C_{H}1).

[0206] A “F(ab′)₂ fragment” is an antibody fragment that results from digestion of an immunoglobulin with pepsin at pH 4.0-4.5, or a fragment having the same structure that is produced synthetically, e.g., by recombinant methods. The F(ab′)₂ fragment essentially contains two Fab fragments where each heavy chain portion contains an additional few amino acids, including cysteine residues that form disulfide linkages joining the two fragments.

[0207] A “Fab′ fragment” is a fragment containing one half (one heavy chain and one light chain) of the F(ab′)₂ fragment.

[0208] An “Fd′ fragment” is a fragment of an antibody containing one heavy chain portion of a F(ab′)₂ fragment.

[0209] An “Fv′ fragment” is a fragment containing only the V_{H} and V_{L} domains of an antibody molecule.

[0210] An “scFv fragment” refers to an antibody fragment that contains a variable light chain (V_{L}) and variable heavy chain (V_{H}), covalently connected by a polypeptide linker in any order. The linker is of a length such that the two variable domains are bridged without substantial interference. Exemplary linkers are (Gly-Ser)ₙ residues with some Glu or Lys residues dispersed throughout to increase solubility.

[0211] “Diabodies” are dimeric scFv; diabodies typically have shorter peptide linkers than scFvs, and preferentially dimerize.

[0212] The term “immunoglobulin superfamily” or “IgSF” as used herein means the group of cell surface and soluble proteins that are involved in the recognition, binding, or adhesion processes of cells. Molecules are categorized as members of this superfamily based on shared structural features with immunoglobulins (i.e., antibodies); they all possess a domain known as an immunoglobulin domain or fold. Many “non-antibody IgSF” members include cell surface proteins or receptors that are not antibodies. Members of the IgSF include cell surface antigen receptors, co-receptors and co-stimulatory molecules of the immune system, molecules involved in antigen presentation to lymphocytes, cell adhesion molecules, certain cytokine receptors and intracellular muscle proteins. They are commonly associated with roles in the immune system. Proteins in the immunological synapse are often members of the IgSF. IgSF can also be classified into “subfamilies” based on shared properties such as function. Such subfamilies typically include from 4 to 30 IgSF members.

[0213] The terms “IgSF domain” or “immunoglobulin domain” or “Ig domain” or “IgD” as used herein refers to a structural domain or domains of IgSF proteins. Ig domains are named after the immunoglobulin molecules. They contain about 70-110 amino acids and are categorized according to their size and function. Ig-domains possess a characteristic Ig-fold, which has a sandwich-like structure formed by two sheets of antiparallel beta strands. Interactions between hydrophobic amino acids on the inner side of the sandwich and highly conserved disulfide bonds formed between cysteine residues in the B and F strands, stabilize the Ig-fold. In some cases, one end of the Ig domain has a section called the complementarity determining region, which, in some aspects, is involved in the specificity of antibodies for their ligands. The Ig like domains can be classified (into classes) as: IgV, IgC1, IgC2, or IgI. Most Ig domains are either variable (IgV) or constant (IgC). IgV domains with 9 beta strands are generally longer than IgC domains with 7 beta strands. Ig domains of some members of the IgSF resemble IgV domains in the amino acid sequence, yet are similar in size to IgC domains. These are called IgC2 domains, while standard IgC domains are called IgC1 domains. T-cell receptor (TCR) chains contain two Ig domains in the extracellular portion; one IgV domain at the N-terminus and one IgC1 domain adjacent to the cell membrane. A “non-antibody IgSF domain” refers to IgSF domain or domains present in proteins other than antibodies, which typically are present in the extracellular portion or domain of certain cell surface proteins. Thus, the extracellular domain (ECD) of IgSF family members contains one or more Ig domains; hence, the term Ig domain is also used with reference to the ECD of such protein molecules. Reference to a variant IgSF domain (vIgD) refers to a variant or modified sequence of an IgD.

[0214] The term “immunological activity” as used herein refers to one or more activities of immune cells, such as T cells or B cells, including, for example, activation, cell survival, cell proliferation, cytokine production (e.g. interferon-gamma), cytotoxicity activity, or ability to activate NF-κB pathway or other signaling cascade leading to activation of a transcription factor in the immune cell. Assays to assess immunological activity of immunomodulatory proteins can be compared to control proteins with a known activity.

[0215] An “immunomodulatory protein” or “immunomodulatory polypeptide” is a protein that modulates immunological activity. By “modulation” or “modulating” an immune response is meant that immunological activity is either enhanced or suppressed. Such modulation includes any induction, or alteration in degree or extent, or suppression of immunological activity of an immune cell, such as a B cell or a T cell. For example, soluble Fc fusion proteins herein may suppress immunological activity of either B cells, T cells or both B cells and T cells. An immunomodulatory protein can be a single polypeptide chain or a multimer (dimers or higher order multimers) of at least two polypeptide chains covalently bonded to each other by, for example, interchain disulfide bonds. Thus, monomeric, dimeric, and higher order multimeric proteins are within the scope of the defined term. Multimeric proteins can be homomultimeric (of identical polypeptide chains) or heteromultimeric (of different polypeptide chains).

[0216] As used herein, modification is in reference to modification of a sequence of amino acids of a polypeptide or a sequence of nucleotides in a nucleic acid molecule and includes a change in amino acids or nucleotides, respectively, of the sequence. The amino acid modification or change may be a deletion, insertion, or replacement (substitution) of amino acids or nucleotides, respectively. Methods of modifying a polypeptide are routine to those of skill in the art, such as by using recombinant DNA methodologies.

[0217] The term, a “multimerization domain” refers to a sequence of amino acids that promotes the formation of a multimer of two or more polypeptides. A multimerization domain includes sequences that promote stable interaction of a polypeptide molecule with one or more additional polypeptide molecules, each containing a complementary multimerization domain (e.g. a first multimerization domain and a second multimerization domain), which can be the same or a different multimerization domain. The interactions between complementary multimerization domains, e.g. interaction between a first multimerization domain and a second multimerization domain, form a stable protein-protein interaction to produce a multimer of the polypeptide molecule with the additional polypeptide molecule. In some cases, the multimerization domain is the same and interacts with itself to form a stable protein-protein interaction between two polypeptide chains. Generally, a polypeptide is joined directly or indirectly to the multimerization domain. Exemplary multimerization domains include the immunoglobulin sequences or portions thereof, leucine zippers, hydrophobic regions, hydrophilic regions, and compatible protein-protein interaction domains. The multimerization domain, for example, can be an immunoglobulin constant region or domain, such as, for example, the Fc domain or portions thereof from IgG, including IgG1, IgG2, IgG3 or IgG4 subtypes, IgA, IgE, IgD and IgM and modified forms thereof.

[0218] The terms “nucleic acid” and “polynucleotide” are used interchangeably to refer to a polymer of nucleic acid residues (e.g., deoxyribonucleotides or ribonucleotides) in either single- or double-stranded form. Unless specifically limited, the terms encompass nucleic acids containing known analogues of natural nucleotides and that have similar binding properties to it and are metabolized in a manner similar to naturally-occurring nucleotides. Unless otherwise indicated, a particular nucleic acid sequence also implicitly encompasses conservatively modified variants thereof (e.g., degenerate codon substitutions) and complementary nucleotide sequences as well as the sequence explicitly indicated. Specifically, degenerate codon substitutions may be achieved by generating sequences in which the third position of one or more selected (or all) codons is substituted with mixed-base and/or deoxyinosine residues. The term nucleic acid or polynucleotide encompasses cDNA or mRNA encoded by a gene.

[0219] The terms “in operable combination,” “in operable order” and “operably linked” as used herein refer to the linkage of nucleic acid sequences in such a manner or orientation that the segments are arranged so that they function in concert for their intended purposes. In some embodiments, the term refers to linkage of nucleic acids to produce a nucleic acid molecule capable of directing the transcription of a given gene and/or to produce a desired protein molecule that is functional. For example, segments of a DNA sequence, e.g. a coding sequence and a regulatory sequence(s), are linked in such a way as to permit gene expression when the appropriate molecules (e.g. transcriptional activator proteins) are bound to the regulatory sequence.

[0220] The term “pharmaceutical composition” refers to a composition suitable for pharmaceutical use in a mammalian subject, often a human. A pharmaceutical composition typically comprises an effective amount of an active agent (e.g., an immunomodulatory protein) and a carrier, excipient, or diluent. The carrier, excipient, or diluent is typically a pharmaceutically acceptable carrier, excipient or diluent, respectively.

[0221] The terms “polypeptide” and “protein” are used interchangeably herein and refer to a molecular chain of two or more amino acids linked through peptide bonds. The terms do not refer to a specific length of the product. Thus, “peptides,” and “oligopeptides,” are included within the definition of polypeptide. The terms include post-translational modifications of the polypeptide, for example, glycosylations, acetylations, phosphorylations and the like. The terms also include molecules in which one or more amino acid analogs or non-canonical or unnatural amino acids are included as can be synthesized, or expressed recombinantly using known protein engineering techniques. In addition, proteins can be derivatized as described herein by well-known organic chemistry techniques.

[0222] The term “purified” as applied to nucleic acids, such as encoding immunomodulatory proteins, or proteins (e.g. immunomodulatory proteins) generally denotes a nucleic acid or polypeptide that is substantially free from other components as determined by analytical techniques well known in the art (e.g., a purified polypeptide or polynucleotide forms a discrete band in an electrophoretic gel, chromatographic eluate, and/or a media subjected to density gradient centrifugation). For example, a nucleic acid or polypeptide that gives rise to essentially one band in an electrophoretic gel is “purified.” A purified nucleic acid or protein is at least about 50% pure, usually at least about 75%, 80%, 85%, 90%, 95%, 96%, 99% or more pure (e.g., percent by weight or on a molar basis).

[0223] The term “recombinant” indicates that the material (e.g., a nucleic acid or a polypeptide) has been artificially (i.e., non-naturally) altered by human intervention. The alteration can be performed on the material within, or removed from, its natural environment or state. For example, a “recombinant nucleic acid” is one that is made by recombining nucleic acids, e.g., during cloning, affinity modification, DNA shuffling or other well-known molecular biological procedures. A “recombinant DNA molecule,” is comprised of segments of DNA joined together by means of such molecular biological techniques. The term “recombinant protein” or “recombinant polypeptide” as used herein refers to a protein molecule (e.g., an immunomodulatory protein) which is expressed using a recombinant DNA molecule. A “recombinant host cell” is a cell that contains and/or expresses a recombinant nucleic acid or that is otherwise altered by genetic engineering, such as by introducing into the cell a nucleic acid molecule encoding a recombinant protein, such as a immunomodulatory protein provided herein. Transcriptional control signals in eukaryotes comprise “promoter” and “enhancer” elements. Promoters and enhancers consist of short arrays of DNA sequences that interact specifically with cellular proteins involved in transcription. Promoter and enhancer elements have been isolated from a variety of eukaryotic sources including genes in yeast, insect and mammalian cells and viruses (analogous control elements, i.e., promoters, are also found in prokaryotes). The selection of a particular promoter and enhancer depends on what cell type is to be used to express the protein of interest.

[0224] The term “recombinant expression vector” as used herein refers to a DNA molecule containing a desired coding sequence (e.g., encoding an immunomodulatory protein) and appropriate nucleic acid sequences necessary for the expression of an operably linked coding sequence in a particular cell. Nucleic acid sequences necessary for expression in prokaryotes include a promoter, optionally an operator sequence, a ribosome binding site and possibly other sequences. Eukaryotic cells are known to utilize promoters, enhancers, and termination and polyadenylation signals. A secretory signal peptide sequence can also, optionally, be encoded by the recombinant expression vector, operably linked to the coding sequence so that the expressed protein can be secreted by the recombinant host cell, such as for its expression as a secretable protein or for more facile isolation or purification of the immunomodulatory protein from the cell, if desired. The term includes the vector as a self-replicating nucleic acid structure as well as the vector incorporated into the genome of a host cell into which it has been introduced. Among the vectors are viral vectors, such as lentiviral vectors.

[0225] The term “sequence identity” as used herein refers to the sequence identity between genes or proteins at the nucleotide or amino acid level, respectively. “Sequence identity” is a measure of identity between proteins at the amino acid level and a measure of identity between nucleic acids at nucleotide level. The protein sequence identity may be determined by comparing the amino acid sequence in a given position in each sequence when the sequences are aligned. Similarly, the nucleic acid sequence identity may be determined by comparing the nucleotide sequence in a given position in each sequence when the sequences are aligned. Methods for the alignment of sequences for comparison are well known in the art, such methods include GAP, BESTFIT, BLAST, BLAST-2, ALIGN or Megalign (DNASTAR) software, FASTA and TFASTA. The BLAST algorithm calculates percent sequence identity and performs a statistical analysis of the similarity between the two sequences. The software for performing BLAST analysis is publicly available through the National Center for Biotechnology Information (NCBI) website. In some cases, a percent sequence identity can be determined as the percentage of amino acid residues (or nucleotide residues) in a candidate sequence that are identical with the amino acid residues (or nucleotide residues) in a reference sequence, after aligning the sequences and introducing gaps, if necessary, to achieve the maximum percent sequence identity. Reference to sequence identity includes sequence identity across the full length of each of the sequences being compared. Those skilled in the art can determine appropriate parameters for aligning sequences, including any algorithms needed to achieve maximal alignment over the full length of the sequences being compared.

[0226] The term “soluble” as used herein in reference to proteins means that the protein is not a membrane protein or is not anchored in a cell membrane. A protein can be constructed as a soluble protein by inclusion of only an extracellular domain or a portion thereof and without a transmembrane domain. In some cases, solubility of a protein can be improved by linkage or attachment, directly or indirectly via a linker, to an Fc domain or other half-life extending molecule, which, in some cases, also can improve the stability and/or half-life of the protein. In some aspects, a soluble protein is an Fc fusion protein.

[0227] The term “specifically binds” as used herein means the ability of a protein, under specific binding conditions, to bind to a target protein such that its affinity or avidity is at least 10 times as great, but optionally 50, 100, 250 or 500 times as great, or even at least 1000 times as great as the average affinity or avidity of the same protein to a collection of random peptides or polypeptides of sufficient statistical size. A specifically binding protein need not bind exclusively to a single target molecule but may specifically bind to more than one target molecule. In some cases, a specifically binding protein may bind to a protein that has similarity in structural conformation with the target protein (e.g., paralogs or orthologs). Those of skill will recognize that specific binding to a molecule having the same function in a different species of animal (i.e., ortholog) or to a molecule having a substantially similar epitope as the target molecule (e.g., paralog) is possible and does not detract from the specificity of binding which is determined relative to a statistically valid collection of unique non-targets (e.g., random polypeptides). Thus, an immunomodulatory protein of the invention, or BIM or TIM thereof, may specifically bind to more than one distinct species of target molecule due to cross-reactivity. Solid-phase ELISA immunoassays, ForteBio Octet or Biacore measurements can be used to determine specific binding between two proteins. Generally, interactions between two binding proteins have dissociation constants (Kd) less than about 1×10⁻⁵ M, and often as low as about 1×10⁻¹² M. In certain aspects of the present disclosure, interactions between two binding proteins have dissociation constants of less than about 1×10⁻⁶ M, 1×10⁻⁷ M, 1×10⁻⁸ M, 1×10⁻⁹ M, 1×10⁻¹⁰ M, or 1×10⁻¹¹ M or less.

[0228] The term “specific binding fragment” or “fragment” as used herein in reference to a protein means a polypeptide that is shorter than a full-length protein or a specific domain or region thereof and that specifically binds in vitro and/or in vivo to a binding partner of the full-length protein or of the specific domain or region. A specific finding fragment is in reference to a fragment of a full length extracellular domain of a polypeptide or a binding domain of a polypeptide, but that still binds to a binding partner of the binding domain. For example, a specific binding fragment is in reference to a fragment of a full-length extracellular domain of an IgSF family member or a full-length IgSF domain thereof (e.g. IgV or IgC), but that still binds to a binding partner of the IgSF family member or of an IgSF domain of an IgSF family member. In another examples, a specific binding fragment is in reference to a fragment of an extracellular domain of a full-length TNFR family member or a full-length TNFR domain (TD) thereof (e.g. CRD), but that still binds to a binding partner of the TNFR family member or of a CRD of an TNFR family member. In some embodiments, the specific binding fragment is at least about 20%, 30%, 40%, 50%, 60%, 70%, 75%, 80%, 85%, 90%, 95%, 96%, 97%, 98%, or 99% the sequence length of the full-length sequence of the extracellular domain or of a domain or region of the extracellular domain. In some embodiments, the specific binding fragment can have an amino acid length of at least 50 amino acids, such as at least 60, 70, 80, 90, 100, or 110 amino acids.

[0229] As used herein, a “subject” is a mammal, such as a human or other animal, and typically is human. The subject can be male or female and can be any suitable age, including infant, juvenile, adolescent, adult, and geriatric subjects.

[0230] As used herein, “synthetic,” with reference to, for example, a synthetic nucleic acid molecule or a synthetic gene or a synthetic peptide refers to a nucleic acid molecule or polypeptide molecule that is produced by recombinant methods and/or by chemical synthesis methods.

[0231] The term “TNF receptor superfamily” or “TNFRSF” as used herein means the group of cell surface cytokine receptors that are all type I (N-terminus extracellular) transmembrane glycoproteins that contain one to six cysteine rich domains (CRD) in their extracellular domain. Molecules are categorized as members of this superfamily based on the shared structural features that include the one or more cysteine rich domain (CRD) present in their N-terminal extracellular region, which often play a role in protein binding of their cognate binding partner or ligand. A TNFRSF protein may have only one or several CRDs (e.g. CRD1, CRD2, etc.). Typically, ECD or ectodomain of TNFRSF members contain between 1 and 6 pseudorepeats of CRDs. For example, BAFF-receptor and BCMA each contain one CRD while TACI contains two CRDs (CRD1 and CRD2). TNFRSF members are usually trimeric or multimeric complexes that are stabilized by their intracysteine disulfide bonds. Binding of TNFRSF proteins to their ligands facilitates various biological activities in cells, such as the induction of apoptotic cell death or cell survival and proliferation.

[0232] The term “TD” refers to a structural domain or domains of TNFRSF proteins or of TNF family ligands. For example, a TD of a TNFRSF protein is a cysteine-rich domain (CRD) module of about 40 amino acids containing six (6) conserved cysteines. Hence, reference to CRD also can be used interchangeably with the term TD in reference to a TD of a TNFRSF protein. The six cysteines are involved in formation of intrachain disulphide bonds. The extracellular domain (ECD) of TNFRSF members contains one or more CRD domains; hence, the term TD is also used with reference to the ECD of such protein molecules. Reference to a variant TD (vTD) refers to a variant or modified sequence of a TD.

[0233] The term “T cell inhibitory molecule” or TIM refers to a protein molecule that antagonizes or blocks the activity of a T cell stimulatory receptor. The TIM can antagonize the activity of the T cell stimulatory receptor by binding directly to the T cell stimulatory receptor or a ligand of the T cell stimulatory receptor, thereby blocking or reducing the binding between the ligand and the T cell stimulatory receptor. For example, a TIM antagonizes or inhibits activity of a T cell costimulatory receptor, such as CD28. In particular embodiments, a TIM provided herein contains the extracellular domain or a portion thereof containing an immunoglobulin superfamily (IgSF) domain, such as an IgV domain, of a cognate ligand of a T cell stimulatory receptor. For example, a TIM includes the extracellular domain of CTLA-4, or a portion of the extracellular domain of CTLA-4 containing an IgSF domain (e.g. IgV domain) that binds to a T cell stimulatory receptor (e.g. CD28). A TIM also can include an affinity-modified variant of the extracellular domain or portion thereof of a cognate ligand of the T cell stimulatory receptor, e.g. CTLA-4, with one more amino acid modifications (e.g. amino acid substitutions) in the IgSF domain that increase binding affinity for the T cell stimulatory receptor (e.g. CD28).

[0234] As used herein, a “T cell stimulatory receptor” refers to a cell surface molecule expressed on a T cell in which engagement or ligation of the molecule results in the direct or indirect activation of one or more tyrosine kinases in the cell and/or culminates in the induction or potentiation of one or more effector cell functions the T cell in which it is expressed. A T cell stimulatory receptor generally contains an extracellular portion, a transmembrane domain and cytoplasmic region. In some embodiments, the cytoplasmic region contains an intracellular signaling domain that contains an immunoreceptor tyrosine-based activation motif (ITAM; defined by the sequence YXX(L/I)X6-8YXX(L/I)) or that otherwise is capable of interacting with or associating with one or more accessory proteins, such as one or more adaptor proteins, involved in or regulating tyrosine phosphorylation in a signal transduction pathway. In some cases, a T cell stimulatory receptor interacts with or associates with an adaptor protein that contains an ITAM or an adaptor protein that contains one or more protein-binding domains, such as e.g., Src homology 2 (SH2) and SH3 domains, that bind specific amino acid sequences, e.g phosphotyrosine residues, within a protein in a signal transduction pathway. Examples of adaptor proteins include, but are not limited to, Lck, Fyn, ZAP70, SLP76, PI3K, Grb2, PKC⊖ and SHC1. Thus, it is understood that the T cell stimulatory receptor itself need not possess intrinsic enzymatic activity but may indirectly mediate enzymatic activities via accessory or adaptor proteins. Typically, engagement of a T cell stimulatory receptor initiates, mediates. or potentiates activation of the T cell resulting in a measurable morphological, phenotypic, and/or functional changes in the T cell, including cell proliferation, cytolytic activity, cytokine production or secretion, or expression of cell surface molecules such as receptors or adhesion molecules. In some embodiments, T cell stimulatory receptor includes a T cell receptor (TCR), CD3, CD4, CD8, CD28, ICOS, or CD2. For example, the T cell stimulatory receptor is a costimulatory receptor, such as CD28.

[0235] The term “trans” with reference to binding to cell surface molecules refers to binding to two different cell surface molecules, each of which is present on the surface of a different cell. In some embodiments, trans means that with respect to two different cell surface molecules, the first is exclusively present on one of the two mammalian cells forming the IS and the second is present exclusively on the second of the two mammalian cells forming the IS.

[0236] The term “transmembrane protein” as used herein means a membrane protein that substantially or completely spans a lipid bilayer such as those lipid bilayers found in a biological membrane such as a mammalian cell, or in an artificial construct such as a liposome. The transmembrane protein comprises a transmembrane domain (“transmembrane domain”) by which it is integrated into the lipid bilayer and by which the integration is thermodynamically stable under physiological conditions. Transmembrane domains are generally predictable from their amino acid sequence via any number of commercially available bioinformatics software applications on the basis of their elevated hydrophobicity relative to regions of the protein that interact with aqueous environments (e.g., cytosol, extracellular fluid). A transmembrane domain is often a hydrophobic alpha helix that spans the membrane. A transmembrane protein can pass through the both layers of the lipid bilayer once or multiple times.

[0237] The terms “treating,” “treatment,” or “therapy” of a disease, condition or disorder as used herein mean slowing, stopping or reversing the disease or disorders progression, as evidenced by decreasing, cessation or elimination of either clinical or diagnostic symptoms, by administration of an immunomodulatory protein or engineered cells of the present invention either alone or in combination with another compound as described herein. “Treating,” “treatment,” or “therapy” also means a decrease in the severity of symptoms in an acute or chronic disease, condition or disorder or a decrease in the relapse rate as for example in the case of a relapsing or remitting autoimmune disease course or inflammatory condition or a decrease in inflammation in the case of an inflammatory aspect of an autoimmune disease or inflammatory condition. “Preventing,” “prophylaxis,” or “prevention” of a disease or disorder as used in the context of this invention refers to the administration of an immunomodulatory protein, either alone or in combination with another compound, to prevent the occurrence or onset of a disease or disorder or some or all of the symptoms of a disease, condition or disorder or to lessen the likelihood of the onset of a disease, condition or disorder.

[0238] The term “variant” (also “modified” or mutant,” which can be used interchangeably) as used in reference to a variant protein or polypeptide means a protein, such as a mammalian (e.g., human or murine) protein created by human intervention. The variant is a polypeptide having an altered or modified amino acid sequence, such as by one or more amino acid substitutions, deletions, additions or combinations thereof, relative to an unmodified or wild-type protein or to a domain thereof. A variant polypeptide can contain 1, 2, 3, 4, 5, 6, 7, 8, 9, 10, 11, 12, 13, 14, 15, 16, 17, 18, 19, 20, 21, 22, 23, 24, 25, 26, 27, 28, 29, 30 or more amino acid differences, such as amino acid substitutions. A variant polypeptide generally exhibits at least 50%, 60%, 70%, 80%, 85%, 86%, 87%, 88%, 89%, 90%, 91%, 92%, 93%, 94%, 95%, 96%, 97%, 98%, 99% or more sequence identity to a corresponding form of a wild-type or unmodified protein, such as a mature sequence thereof (lacking the signal sequence) or a portion thereof containing the extracellular domain or an binding domain thereof. Non-naturally occurring amino acids as well as naturally occurring amino acids are included within the scope of permissible substitutions or additions. A variant protein is not limited to any particular method of making and includes, for example, chemical synthesis, recombinant DNA techniques, or combinations thereof. A variant protein of the invention specifically binds to at least one or more binding partners. In some embodiments, the altered amino acid sequence results in an altered (i.e., increased or decreased) binding activity, such as binding affinity or avidity, to the one or more binding partners. A variant protein may thus be an “affinity-modified” protein as described herein.

[0239] The term “wild-type” or “natural” or “native,” which are used interchangeably, as used herein is used in connection with biological materials such as nucleic acid molecules, proteins, host cells, and the like, that are found in nature and not modified by human intervention.

### II. BCMA Immunomodulatory Proteins and Variant BCMA Polypeptides

[0240] Provided herein are BCMA immunomodulatory proteins that contain a portion of the extracellular domain (ECD) of the BCMA receptor, or a variant thereof, that bind to at least one BCMA cognate binding partner. Also provided herein are variant BCMA polypeptides that exhibit altered (e.g. increased) binding activity or affinity for one or more of a BCMA cognate binding partner. In some embodiments, the BCMA cognate binding partner is one or more of BAFF or APRIL or is a BAFF/APRIL heterotrimer. The provided BCMA immunomodulatory proteins and polypeptides include soluble fusion proteins thereof in which the BCMA portion of the extracellular domain or variant thereof is linked to another moiety, such as an immunoglobulin Fc or other multimerization domain or half-life extending moiety. Thus, in some embodiments the immunomodulatory protein is a BCMA-Fc fusion protein. In some embodiments, provided is a BCMA-Fc fusion protein containing (1) a BCMA polypeptide composed of the extracellular domain of the BCMA receptor or a portion thereof, or a variant BCMA polypeptide thereof, that binds to at least one BCMA cognate binding partner, and (2) an Fc domain. The BCMA polypeptide or variant BCMA polypeptide can be linked directly or indirectly (e.g. via a peptide linker) to the Fc domain.

[0241] BCMA is a tumor necrosis factor receptor family member characterized by having an extracellular domain (ECD) containing cysteine-rich pseudo-repeat domain (CRD). BCMA is a membrane bound receptor, which has an extracellular domain containing a single CRD, a transmembrane domain and a cytoplasmic domain that contains TRAF-binding sites for binding to TRAF signaling molecules. BCMA binds to cognate ligands APRIL and BAFF, although binding to BAFF is with weaker affinity. It is reported that BCMA binds to BAFF with two to three orders of magnitude weaker binding than binding between BAFF and its other cognate receptors BAFF-R and TACI (Bossen and Schneider et al. 2006 Seminars in Immunology, 18:263-75).

[0242] The amino acid sequence of the full length BCMA is set forth in SEQ ID NO:667. The protein is a type II membrane protein and lacks a signal peptide; following expression in eukaryotic cells the N-terminal methionine is removed. In some embodiments, a mature BCMA protein does not contain the N-terminal methionine as set forth in SEQ ID NO:667. The extracellular domain of BCMA (amino acid residues 1-54 of SEQ ID NO:667; ECD set forth in SEQ ID NO:710) contains one cysteine rich domain (CRD, hereinafter also called a tumor necrosis family receptor domain or TD), which exhibits affinity for binding to APRIL and to a lesser extent BAFF. The CRD contains amino acid residues 7-41 of the sequence set forth in SEQ ID NO:710.

[0243] In some embodiments, the variant BCMA polypeptides provided herein contain one or more amino acid modifications, such as one or more substitutions (alternatively, “mutations” or “replacements”), deletions or additions in the extracellular domain of a reference BCMA polypeptide, such as a wild-type or unmodified BCMA polypeptide containing a CRD (hereinafter also called TD). Thus, a provided variant BCMA polypeptide is or comprises a variant TD (“vTD”) in which the one or more amino acid modifications (e.g. substitutions) is in the CRD.

[0244] In some embodiments, the reference (e.g. unmodified) BCMA sequence is a wild-type BCMA sequence or is a portion thereof that contains the CRD. In some embodiments, the reference (e.g., unmodified) BCMA is or comprises the extracellular domain (ECD) of BCMA or a portion thereof containing the CRD. In some embodiments, the variant BCMA polypeptide comprises or consists essentially of the CRD or a specific binding fragment thereof. In some embodiments, the variant BCMA is a soluble polypeptide and lacks a transmembrane domain. In some embodiments, the variant BCMA polypeptide further comprises a transmembrane domain and, in some cases, also a cytoplasmic domain.

[0245] In some embodiments, the reference (e.g., unmodified) BCMA sequence is a mammalian BCMA sequence. In some embodiments, the reference (e.g., unmodified) BCMA sequence can be a mammalian BCMA that includes, but is not limited to, human, mouse, cynomolgus monkey, or rat. In some embodiments, the reference (e.g., unmodified) BCMA sequence is human. The extracellular domain of an exemplary human BCMA sequence is set forth in SEQ ID NO:710.

[0246] In some embodiments, the reference (e.g., unmodified) BCMA sequence has (i) the sequence of amino acids set forth in SEQ ID NO:710 or a sequence thereof that lacks the N-terminal methionine, (ii) a sequence of amino acids that exhibits at least 85%, 86%, 87%, 88%, 89%, 90%, 91%, 92%, 93%, 94%, 95%, 96%, 97%, 98%, 99% or more sequence identity to SEQ ID NO:710 and that binds to APRIL or BAFF, or (iii) is a fragment or portion of (i) or (ii) containing a CRD, in which the portion binds to APRIL or BAFF. In some embodiments, the reference (e.g., unmodified) BCMA sequence lacks the N-terminal methionine as set forth in SEQ ID NO: 710.

BCMA Extracellular Domain (ECD):
SEQ ID NO: 710
MLQMAGQCSQNEYFDSLLHACIPCQLRCSSNTPPLTCQRYCNASVTNSV
KGTNA

[0247] In some embodiments, the reference (e.g., unmodified) BCMA sequence lacks the N-terminal methionine as set forth in SEQ ID NO: 710. In some embodiments, the reference (e.g., unmodified) BCMA sequence has (i) the sequence of amino acids set forth in SEQ ID NO:356, (ii) a sequence of amino acids that exhibits at least 85%, 86%, 87%, 88%, 89%, 90%, 91%, 92%, 93%, 94%, 95%, 96%, 97%, 98%, 99% or more sequence identity to SEQ ID NO:356 and that binds to APRIL or BAFF, or (iii) is a fragment or portion of (i) or (ii) containing a CRD, in which the portion binds to APRIL or BAFF.

BCMA Extracellular Domain (ECD):
SEQ ID NO: 356
LQMAGQCSQNEYFDSLLHACIPCQLRCSSNTPPLTCQRYCNASVTNSVK
GTNA

[0248] Among provided BCMA polypeptides are variant BCMA polypeptides. Also provided are immunomodulatory proteins, such as BCMA-Fc fusion proteins, that contain a provided variant BCMA polypeptide. In some of any of the provided embodiments, the variant BCMA sequence has the sequence of the reference (e.g. unmodified) BCMA sequence, such as any described above, but additionally contains one more amino acid modifications, such as one or more amino acid substitutions. In particular, provided herein are variant BCMA polypeptides containing at least one affinity-modified TD domain (CRD) or a specific binding fragment thereof that contains one or more amino acid substitutions in a TD domain of a reference (e.g., unmodified or wild-type) BCMA polypeptide, such that the variant BCMA polypeptide exhibits altered (e.g. increased) binding activity or affinity for one or both of APRIL or BAFF compared to the reference (e.g., unmodified or wild-type) BCMA polypeptide. In some embodiments, a variant BCMA polypeptide has a binding affinity for APRIL and/or BAFF that differs from that of a reference (e.g., unmodified or wild-type) BCMA polypeptide control sequence as determined by, for example, solid-phase ELISA immunoassays, flow cytometry or Biacore assays. Binding affinities for each of the cognate binding partners are independent; that is, in some embodiments, a variant BCMA polypeptide has an increased binding affinity for one or both APRIL and BAFF, and a decreased or unchanged binding affinity for the other of APRIL or BAFF, relative to a reference (e.g., unmodified or wild-type) BCMA polypeptide.

[0249] In some embodiments, the variant BCMA polypeptide has an increased binding affinity for BAFF, relative to the reference (unmodified or wild-type) BCMA polypeptide. In some embodiments, the variant BCMA polypeptide has an increased binding affinity for APRIL relative to the reference (unmodified or wild-type) BCMA polypeptide. In some embodiments, the variant BCMA polypeptide has an increased binding affinity for APRIL and BAFF relative to the reference (unmodified or wild-type) BCMA polypeptide. The cognate ligands BAFFF and/or APRIL can be a mammalian protein, such as a human protein or a murine protein. In some embodiments, a variant BCMA polypeptide with increased or greater binding affinity to APRIL and/or BAFF will have an increase in binding affinity relative to the reference (e.g., unmodified or wild-type) BCMA polypeptide control of at least about 5%, such as at least about 10%, 15%, 20%, 25%, 35%, or 50%. In some embodiments, the increase in binding affinity relative to the reference (e.g., unmodified or wild-type) BCMA polypeptide is more than 1.2-fold, 1.5-fold, 2-fold, 3-fold, 4-fold, 5-fold, 6-fold, 7-fold, 8-fold, 9-fold, 10-fold, 20-fold, 30-fold 40-fold or 50-fold. In any of the examples, the reference (e.g., unmodified or wild-type) BCMA polypeptide has the same sequence as the variant BCMA polypeptide except that it does not contain the one or more amino acid modifications (e.g., substitutions).

[0250] In some embodiments, the equilibrium dissociation constant (K_{d}) of any of the foregoing embodiments to BAFF can be less than 1×10⁻⁵ M, 1×10⁻⁶ M, 1×10⁻⁷ M, 1×10⁻⁸ M, 1×10⁻⁹ M, 1×10⁻¹⁰ M or 1×10⁻¹¹M, or 1×10⁻¹² M. In some embodiments, the K_{d} of any of the foregoing embodiments to BAFF is less than at or about 1×10⁻⁹ M, 1×10⁻¹⁰ M or 1×10⁻¹¹M, or 1×10⁻¹² M. In some embodiments, the K_{d} of any of the foregoing embodiments to BAFF is between 1×10⁻⁹ M and at or about 1×10⁻¹² M. In some embodiments, the K_{d} of any of the foregoing embodiments to BAFF is at or about 1×10⁻⁹ M, at or about 2×10⁻⁹ M, at or about 4×10⁻⁹ M, at or about 6×10⁻⁹ M, at or about 8×10⁻⁹ M, at or about 1×10⁻¹⁰ M, at or about 2×10⁻¹⁰ M, at or about 4×10⁻¹⁰ M, at or about 6×10⁻¹⁰ M, at or about 8×10⁻¹⁰ M, at or about 1×10⁻¹¹ M, at or about 2×10⁻¹¹ M, at or about 4×10⁻¹¹ M, at or about 6×10⁻¹¹ M, at or about 8×10⁻¹¹ M, or at or about 1×10⁻¹¹ M, or any value between any of the foregoing. In some embodiments, a provided embodiment includes a variant BCMA polypeptide as described above and the K_{d} to BAFF is decreased (higher binding affinity) by greater than or greater than about 1.5-fold, such as greater than or about 2-fold, 3-fold, 4-fold, 5-fold, 6-fold, 7-fold, 8-fold, 9-fold, 10-fold or more.

[0251] In some embodiments, the equilibrium dissociation constant (K_{d}) of any of the foregoing embodiments to APRIL can be less than 1×10⁻⁵ M, 1×10⁻⁶ M, 1×10⁻⁷ M, 1×10⁻⁸ M, 1×10⁻⁹ M, 1×10⁻¹⁰ M or 1×10⁻¹¹M, or 1×10⁻¹² M. In some embodiments, the K_{d} of any of the foregoing embodiments to APRIL is less than at or about 1×10⁻⁹ M, 1×10⁻¹⁰ M or 1×10⁻¹¹M, or 1×10⁻¹² M. In some embodiments, the K_{d} of any of the foregoing embodiments to APRIL is between 1×10⁻⁹ M and at or about 1×10⁻¹² M. In some embodiments, the K_{d} of any of the foregoing embodiments to APRIL is at or about 1×10⁻⁹ M, at or about 2×10⁻⁹ M, at or about 4×10⁻⁹ M, at or about 6×10⁻⁹ M, at or about 8×10⁻⁹ M, at or about 1×10⁻¹⁰ M, at or about 2×10⁻¹⁰ M, at or about 4×10⁻¹⁰ M, at or about 6×10⁻¹⁰ M, at or about 8×10⁻¹⁰ M, at or about 1×10⁻¹¹ M, at or about 2×10⁻¹² M, at or about 4×10⁻¹¹ M, at or about 6×10⁻¹¹ M, at or about 8×10⁻¹¹ M, or at or about 1×10⁻¹² M, or any value between any of the foregoing. In some embodiments, a provided embodiment includes a variant BCMA polypeptide as described above and the K_{d} to APRIL is decreased (higher binding affinity) by greater than or greater than about 1.5-fold, such as greater than or about 2-fold, 3-fold, 4-fold, 5-fold, 6-fold, 7-fold, 8-fold, 9-fold, 10-fold or more.

[0252] The reference (e.g., unmodified or wild-type) BCMA sequence does not necessarily have to be used as a starting composition to generate variant BCMA polypeptides described herein. Therefore, use of the term “modification”, such as “substitution” does not imply that the present embodiments are limited to a particular method of making variant BCMA polypeptides or immunomodulatory proteins containing the same. Variant BCMA polypeptides can be made, for example, by de novo peptide synthesis and thus does not necessarily require a modification, such as a “substitution”, in the sense of altering a codon to encode for the modification, e.g. substitution. This principle also extends to the terms “addition” and “deletion” of an amino acid residue which likewise do not imply a particular method of making. The means by which the variant BCMA polypeptides are designed or created is not limited to any particular method. In some embodiments, however, a reference (e.g., unmodified or wild-type) BCMA encoding nucleic acid is mutagenized from reference (e.g., unmodified or wild-type) BCMA genetic material and screened for desired specific binding affinity or other functional activity. In some embodiments, a variant BCMA polypeptide is synthesized de novo utilizing protein or nucleic acid sequences available at any number of publicly available databases and then subsequently screened. The National Center for Biotechnology Information provides such information and its website is publicly accessible via the internet as is the UniProtKB database as discussed previously.

[0253] Unless stated otherwise, as indicated throughout the present disclosure, the amino acid modification (s) in a variant BCMA polypeptide are designated by amino acid position number corresponding to the numbering of positions of the reference ECD sequence set forth in SEQ ID NO:710. It is within the level of a skilled artisan to identify the corresponding position of a modification, e.g. amino acid substitution, in an BCMA polypeptide, including portion thereof containing TD (CRD) thereof, such as by alignment of a reference sequence (e.g. SEQ ID NO:356) with SEQ ID NO:710. An alignment identifying corresponding residues is exemplified in FIG. 17B. In the listing of modifications throughout this disclosure, the amino acid position is indicated in the middle, with the corresponding reference (e.g. unmodified or wild-type) amino acid listed before the number and the identified variant amino acid substitution listed after the number. If the modification is a deletion of the position a “del” is indicated and if the modification is an insertion at the position an “ins” is indicated. In some cases, an insertion is listed with the amino acid position indicated in the middle, with the corresponding reference amino acid listed before and after the number and the identified variant amino acid insertion listed after the unmodified (e.g. wild-type) amino acid.

[0254] In some embodiments, the variant BCMA polypeptide has one or more amino acid modification, e.g. substitution in a reference (e.g., unmodified or wild-type) BCMA sequence, such as any as described. The one or more amino acid modification, e.g. substitution, can be in the ectodomain (extracellular domain) of the reference (e.g., unmodified or wild-type) BCMA sequence. In some embodiments, the one or more amino acid modification, e.g. substitution is in the CRD domain or specific binding fragment thereof.

[0255] In some embodiments, the variant BCMA polypeptide has up to 1, 2, 3, 4, 5, 6, 7, 8, 9, 10, 11, 12, 13, 14, 15, 16, 17, 18, 19, or 20 amino acid modification(s), e.g. substitution. The modification, e.g. substitution can be in the CRD. In some embodiments, the variant BCMA polypeptide has up to 1, 2, 3, 4, 5, 6, 7, 8, 9, 10, 11, 12, 13, 14, 15, 16, 17, 18, 19, or 20 amino acid substitutions in the CRD or specific binding fragment thereof. In some embodiments, the variant BCMA polypeptide containing the one or more amino acid modifications (e.g. amino acid substitutions) as described has at least about 85%, 86%, 86%, 88%, 89%, 90%, 91%, 92%, 93%, 94%, 95%, 96%, 97%, 98%, or 99% sequence identity with the reference (e.g., unmodified or wild-type) BCMA polypeptide or specific binding fragment thereof, such as with the amino acid sequence of SEQ ID NO: 710 or 356. In some embodiments, the variant BCMA polypeptide containing the one or more amino acid modifications (e.g. amino acid substitutions) as described has at least about 85%, 86%, 86%, 88%, 89%, 90%, 91%, 92%, 93%, 94%, 95%, 96%, 97%, 98%, or 99% sequence identity with the amino acid sequence of SEQ ID NO: 710. In some embodiments, the variant BCMA polypeptide containing the one or more amino acid modifications (e.g. amino acid substitutions) as described has at least about 85%, 86%, 86%, 88%, 89%, 90%, 91%, 92%, 93%, 94%, 95%, 96%, 97%, 98%, or 99% sequence identity with the amino acid sequence of SEQ ID NO: 356.

[0256] In some embodiments, the variant BCMA polypeptide has one or more amino acid modification, e.g. substitution in a reference BCMA polypeptide or specific binding fragment there of corresponding to position(s) 9, 10, 11, 14, 16, 19, 20, 22, 25, 27, 29, 30, 31, 32, 35, 36, 39, 43, 45, 46, 47 or 48 with reference to numbering of SEQ ID NO:710. In some embodiments, the variant BCMA polypeptide has one or more amino acid modification, e.g. substitution selected from S9G, S9N, S9Y, Q10E, Q10P, N11D, N11S, F14Y, S16A, H19A, H19C, H19D, H19E, H19F, H19G, H19I, H19K, H19L, H19M, H19N, H19P, H19Q, H19R, H19S, H19T, H19V, H19W, H19Y, A20T, I22L, I22V, Q25E, Q25F, Q25G, Q25H, Q25I, Q25K, Q25L, Q25M, Q25S, Q25V, Q25Y, R27H, R27L, S29P, S30G, S30Y, N31D, N31G, N31H, N31K, N31L, N31M, N31P, N31S, N31V, N31Y, T32I, T32S, L35A, L35M, L35P, L35S, L35V, L35Y, T36A, T36G, T36N, T36M, T36S, T36V, R39L, R39Q, A43E, A43S, V45A, V45D, V45I, T46A, T46I, N47D, N47Y, S48G, or a conservative amino acid substitution thereof. In some embodiments, the reference BCMA polypeptide is set forth in SEQ ID NO: 356.

[0257] A conservative amino acid modification, e.g. substitution is any amino acid that falls in the same class of amino acids as the substituted amino acids, other than the reference (e.g., unmodified) or wild-type amino acid. The classes of amino acids are aliphatic (glycine, alanine, valine, leucine, and isoleucine), hydroxyl or sulfur-containing (serine, cysteine, threonine, and methionine), cyclic (proline), aromatic (phenylalanine, tyrosine, tryptophan), basic (histidine, lysine, and arginine), and acidic/amide (aspartate, glutamate, asparagine, and glutamine).

[0258] In some embodiments, the variant BCMA polypeptide includes at least one amino acid substitution at position 9. In some embodiment, the at least one amino acid substitution is S9G, S9N, S9Y.

[0259] In some embodiments, the variant BCMA polypeptide includes at least one amino acid substitution at position 10. In some embodiment, the at least one amino acid substitution is Q10E, Q10P.

[0260] In some embodiments, the variant BCMA polypeptide includes at least one amino acid substitution at position 11. In some embodiment, the at least one amino acid substitution is N11D, N11S.

[0261] In some embodiments, the variant BCMA polypeptide includes at least one amino acid substitution at position 19. In some embodiment, the at least one amino acid substitution is H19A, H19C, H19D, H19E, H19F, H19G, H19I, H19K, H19L, H19M, H19N, H19P, H19Q, H19R, H19S, H19T, H19V, H19W, H19Y. In some embodiments, the at least one amino acid substitution is H19L. In some embodiments, the at least one amino acid substitution is H19K. In some embodiments, the at least one amino acid substitution is H19Q. In some embodiments, the at least one amino acid substitution is H19R. In some embodiments, the at least one amino acid substitution is H19Y.

[0262] In some embodiments, the variant BCMA polypeptide includes at least one amino acid substitution at position 22. In some embodiment, the at least one amino acid substitution is I22L, I22V.

[0263] In some embodiments, the variant BCMA polypeptide includes at least one amino acid substitution at position 25. In some embodiment, the at least one amino acid substitution is Q25E, Q25F, Q25G, Q25H, Q25I, Q25K, Q25L, Q25M, Q25S, Q25V, Q25Y.

[0264] In some embodiments, the variant BCMA polypeptide includes at least one amino acid substitution at position 27. In some embodiment, the at least one amino acid substitution is R27H, R27L.

[0265] In some embodiments, the variant BCMA polypeptide includes at least one amino acid substitution at position 30. In some embodiment, the at least one amino acid substitution is S30G, S30Y.

[0266] In some embodiments, the variant BCMA polypeptide includes at least one amino acid substitution at position 31. In some embodiment, the at least one amino acid substitution is N31D, N31G, N31H, N31K, N31L, N31M, N31P, N31S, N31V, N31Y.

[0267] In some embodiments, the variant BCMA polypeptide includes at least one amino acid substitution at position 32. In some embodiment, the at least one amino acid substitution is T32I, T32S.

[0268] In some embodiments, the variant BCMA polypeptide includes at least one amino acid substitution at position 35. In some embodiment, the at least one amino acid substitution is L35A, L35M, L35P, L35S, L35V, L35Y.

[0269] In some embodiments, the variant BCMA polypeptide includes at least one amino acid substitution at position 36. In some embodiment, the at least one amino acid substitution is T36A, T36G, T36N, T36M, T36S, T36V.

[0270] In some embodiments, the variant BCMA polypeptide includes at least one amino acid substitution at position 39. In some embodiment, the at least one amino acid substitution is R39L, R39Q.

[0271] In some embodiments, the variant BCMA polypeptide includes at least one amino acid substitution at position 43. In some embodiment, the at least one amino acid substitution is A43E, A43S.

[0272] In some embodiments, the variant BCMA polypeptide includes at least one amino acid substitution at position 45. In some embodiment, the at least one amino acid substitution is V45A, V45D, V45I.

[0273] In some embodiments, the variant BCMA polypeptide includes at least one amino acid substitution at position 46. In some embodiment, the at least one amino acid substitution is T46A, T46I.

[0274] In some embodiments, the variant BCMA polypeptide includes at least one amino acid substitution at position 47. In some embodiment, the at least one amino acid substitution is N47D, N47Y.

[0275] In some embodiments, the one or more amino acid substitutions comprise S16A/H19Y/R39Q.

[0276] In some embodiments, the variant BCMA polypeptide comprises any of the mutations listed in Table 1. Table 1 also provides exemplary sequences by reference to SEQ ID NO of the reference (e.g., unmodified) BCMA polypeptide, and exemplary variant BCMA polypeptides. As indicated, the exact locus or residues corresponding to a given domain can vary, such as depending on the methods used to identify or classify the domain. Also, in some cases, adjacent N- and/or C-terminal amino acids of a given domain (e.g. CRD) also can be included in a sequence of a variant BCMA polypeptide, such as to ensure proper folding of the domain when expressed. Thus, it is understood that the exemplification of the SEQ ID NOSs in Table 1 is not to be construed as limiting. For example, the particular domain, such as the ECD domain or a portion thereof containing the CRD1/CRD2 or CRD2 only, of a variant BCMA polypeptide can be several amino acids longer or shorter, such as 1-10, e.g., 1, 2, 3, 4, 5, 6 or 7 amino acids longer or shorter, than the sequence of amino acids set forth in the respective SEQ ID NO.

[0277] In some embodiments, the variant BCMA polypeptide comprises any of the mutations listed in Table 1. In some examples, the mutations are made in a reference BCMA containing the sequence of amino acids set forth in SEQ ID NO: 710. In some examples, the mutations are made in a reference BCMA containing the sequence of amino acids set forth in SEQ ID NO: 356.

[0278] The use of the term “modification”, such as “substitution” or “mutation,” does not imply that the present embodiments are limited to a particular method of making the immunomodulatory proteins. A variant BCMA polypeptide can be made, for example, by de novo peptide synthesis and thus does not necessarily require a modification, such as a “substitution” in the sense of altering a codon to encode for the modification, e.g. substitution. This principle also extends to the terms “addition” and “deletion” of an amino acid residue which likewise do not imply a particular method of making. The means by which the vTDs are designed or created is not limited to any particular method. In some embodiments, however, a wild-type or unmodified TD encoding nucleic acid is mutagenized from wild-type or unmodified TD genetic material and screened for desired specific binding activity, e.g. binding affinity, and/or alteration of NF-κB modulation or other functional activity. In some embodiments, a vTD is synthesized de novo utilizing protein or nucleic acid sequences available at any number of publicly available databases and then subsequently screened. The National Center for Biotechnology Information provides such information and its website is publicly accessible via the internet as is the UniProtKB database.

[0279] In some embodiments, the variant BCMA polypeptide comprises an extracellular domain (ECD) sequences set forth in any one of SEQ ID NOS: 357-435. In some embodiments, the variant BCMA polypeptide comprises a polypeptide sequence that exhibits at least 90% identity, at least 91% identity, at least 92% identity, at least 93% identity, at least 94% identity, at least 95% identity, such as at least 96% identity, 97% identity, 98% identity, or 99% identity to any one of SEQ ID NOS: 357-435, and retains the amino acid modification(s), e.g. substitution(s) therein not present in the reference (e.g., unmodified or wild-type) BCMA. In some embodiments, the variant BCMA polypeptide comprises a specific binding fragment of any one of SEQ ID NOS: 357-435, in which the specific binding fragment binds BAFF and/or APRIL and contains a contiguous sequence therein that contains the amino acid modification(s), e.g. substitution (s) therein not present in the reference (e.g., unmodified or wild-type) BCMA.

[0280] In some embodiments, the variant BCMA polypeptide comprises the sequence set forth in SEQ ID NO:381. In some embodiments, the variant BCMA polypeptide consists essentially of the sequence set forth in SEQ ID NO:381. In some embodiments, the variant BCMA polypeptide consists of the sequence set forth in SEQ ID NO:381.

[0281] In some embodiments, the variant BCMA polypeptide comprises the sequence set forth in SEQ ID NO:405. In some embodiments, the variant BCMA polypeptide consists essentially of the sequence set forth in SEQ ID NO:405. In some embodiments, the variant BCMA polypeptide consists of the sequence set forth in SEQ ID NO:405.

[0282] In some embodiments, the variant BCMA polypeptide comprises the sequence set forth in SEQ ID NO:406. In some embodiments, the variant BCMA polypeptide consists essentially of the sequence set forth in SEQ ID NO:406. In some embodiments, the variant BCMA polypeptide consists of the sequence set forth in SEQ ID NO:406.

[0283] In some embodiments, the variant BCMA polypeptide comprises the sequence set forth in SEQ ID NO:410. In some embodiments, the variant BCMA polypeptide consists essentially of the sequence set forth in SEQ ID NO:410. In some embodiments, the variant BCMA polypeptide consists of the sequence set forth in SEQ ID NO:410.

[0284] In some embodiments, the variant BCMA polypeptide comprises the sequence set forth in SEQ ID NO:411. In some embodiments, the variant BCMA polypeptide consists essentially of the sequence set forth in SEQ ID NO:411. In some embodiments, the variant BCMA polypeptide consists of the sequence set forth in SEQ ID NO:411.

[0285] In some embodiments, the variant BCMA polypeptide is encoded by a sequence of nucleotides set forth in any of SEQ ID NOS: 437-515. In some embodiments, the variant BCMA polypeptide is encoded by a sequence of nucleotides that exhibits at least 90% identity, at least 910% identity, at least 92% identity, at least 93% identity, at least 94% identity, at least 95% identity, such as at least 96% identity, 97% identity, 98% identity, or 99% identity to any one of SEQ ID NOS: 437-515, and retains the amino acid modification(s), e.g. substitution(s) therein not present in the reference (e.g., unmodified or wild-type) BCMA. Also provided herein is a nucleic acid containing the sequence set forth in any of SEQ ID NOS: 437-515 or a sequence that exhibits at least 90% identity, at least 91% identity, at least 92% identity, at least 93% identity, at least 94% identity, at least 95% identity, such as at least 96% identity, 97% identity, 98% identity, or 99% identity to any one of SEQ ID NOS: 437-515.

TABLE 1
Exemplary variant BCMA in BCMA immunomodulatory protein
(e.g. BCMA-Fc) or as a BIM

| | | ECD SEQ ID | |
|---|---|---|---|
| | | NO | |
| | | AA | NT |
| | | SEQ | SEQ |
| Name | Mutation(s) | ID NO | ID NO |
| 356 (WT) | Wild-type | 356 | 436 |
| 357 BCMA | H19Y | 357 | 437 |
| 358 BCMA | H19Y, S30G | 358 | 438 |
| 359 BCMA | H19Y, V45A | 359 | 439 |
| 360 BCMA | F14Y, H19Y | 360 | 440 |
| 361 BCMA | H19Y, V45D | 361 | 441 |
| 362 BCMA | H19Y, A43E | 362 | 442 |
| 363 BCMA | H19Y, T36A | 363 | 443 |
| 364 BCMA | H19Y, I22V | 364 | 444 |
| 365 BCMA | N11D, H19Y | 365 | 445 |
| 366 BCMA | H19Y, T36M | 366 | 446 |
| 367 BCMA | N11S, H19Y | 367 | 447 |
| 368 BCMA | H19Y, L35P, T46A | 368 | 448 |
| 369 BCMA | H19Y, N47D | 369 | 449 |
| 370 BCMA | S9D, H19Y | 370 | 450 |
| 371 BCMA | H19Y, S30G, V45D | 371 | 451 |
| 372 BCMA | H19Y, R39Q | 372 | 452 |
| 373 BCMA | H19Y, L35P | 373 | 453 |
| 374 BCMA | S9D, H19Y, R27H | 374 | 454 |
| 375 BCMA | Q10P, H19Y, Q25H | 375 | 455 |
| 376 BCMA | H19Y, R39L, N47D | 376 | 456 |
| 377 BCMA | N11D, H19Y, N47D | 377 | 457 |
| 378 BCMA | H19Y, T32S | 378 | 458 |
| 379 BCMA | N11S, H19Y, S29P | 379 | 459 |
| 380 BCMA | H19Y, R39Q, N47D | 380 | 460 |
| 381 BCMA | S16A, H19Y, R39Q | 381 | 461 |
| 382 BCMA | S9N, H19Y, N31K, T46I | 382 | 462 |
| 383 BCMA | H19Y, R27L, N31Y, T32S, T36A | 383 | 463 |
| 384 BCMA | N11S, H19Y, T46A | 384 | 464 |
| 385 BCMA | H19Y, T32I | 385 | 465 |
| 386 BCMA | S9G, H19Y, T36S, A43S | 386 | 466 |
| 387 BCMA | H19Y, S48G | 387 | 467 |
| 388 BCMA | S9N, H19Y, I22V, N31D | 388 | 468 |
| 389 BCMA | S9N, H19Y, Q25K, N31D | 389 | 469 |
| 390 BCMA | S9G, H19Y, T32S | 390 | 470 |
| 391 BCMA | H19Y, T36A, N47Y | 391 | 471 |
| 392 BCMA | H19Y, V45A, T46I | 392 | 472 |
| 393 BCMA | H19Y, Q25K, N31D | 393 | 473 |
| 394 BCMA | H19Y, Q25H, R39Q, V45D | 394 | 474 |
| 395 BCMA | H19Y, T32S, N47D | 395 | 475 |
| 396 BCMA | Q10E, H19Y, A20T, T36S | 396 | 476 |
| 397 BCMA | H19Y, T32S, V45I | 397 | 477 |
| 398 BCMA | H19A | 398 | 478 |
| 399 BCMA | H19C | 399 | 479 |
| 400 BCMA | H19D | 400 | 480 |
| 401 BCMA | H19E | 401 | 481 |
| 402 BCMA | H19F | 402 | 482 |
| 403 BCMA | H19G | 403 | 483 |
| 404 BCMA | H19I | 404 | 484 |
| 405 BCMA | H19K | 405 | 485 |
| 406 BCMA | H19L | 406 | 486 |
| 407 BCMA | H19M | 407 | 487 |
| 408 BCMA | H19N | 408 | 488 |
| 409 BCMA | H19P | 409 | 489 |
| 410 BCMA | H19Q | 410 | 490 |
| 411 BCMA | H19R | 411 | 491 |
| 412 BCMA | H19S | 412 | 492 |
| 413 BCMA | H19T | 413 | 493 |
| 414 BCMA | H19V | 414 | 494 |
| 415 BCMA | H19W | 415 | 495 |
| 416 BCMA | H19F, Q25E, N31L, L35Y, T36S | 416 | 496 |
| 417 BCMA | H19F, Q25F, N31S, T36S | 417 | 497 |
| 418 BCMA | H19I, Q25F, N31S, T36V | 418 | 498 |
| 419 BCMA | H19F, Q25V, N31M, T36S | 419 | 499 |
| 420 BCMA | H19Y, Q25Y, N31L, L35Y, T36S | 420 | 500 |
| 421 BCMA | H19F, Q25I, N31M, L35A, T36S | 421 | 501 |
| 422 BCMA | H19I, Q25L, N31L, L35Y, T36S | 422 | 502 |
| 423 BCMA | H19F, Q25L, N31G, L35P, T36A | 423 | 503 |
| 424 BCMA | H19Y, I22L, N31G | 424 | 504 |
| 425 BCMA | H19F, I22V, Q25M, N31P, T36M | 425 | 505 |
| 426 BCMA | H19Y, N31L, L35Y, T36S | 426 | 506 |
| 427 BCMA | H19L, S30G, N31H, L35A | 427 | 507 |
| 428 BCMA | H19L, Q25S, N3IV, L35S, T36V | 428 | 508 |
| 429 BCMA | H19L, Q25S, S30Y, N31G, L35M, T36V | 429 | 509 |
| 430 BCMA | H19F, Q25F, N31L, L35Y, T36S | 430 | 510 |
| 431 BCMA | H19F, Q25F, N31S, T36G | 431 | 511 |
| 432 BCMA | H19F, I22V, Q25S, N31V, L35S, T36V | 432 | 512 |
| 433 BCMA | H19F, Q25G, N31S, L35V, T36N | 433 | 513 |
| 434 BCMA | H19L, Q25H, N31D, L35S | 434 | 514 |
| 435 BCMA | H19F, Q25F, N31S, L35Y, T36S | 435 | 515 |

[0286] In some embodiments, also provided herein are BCMA ECD fusion sequences in which any of the above BCMA sequence is linked or fused to a multimerization domain, such as any described herein. Exemplary multimerization domains are described in Section IV.C. In some embodiments, the multimerization domain is an immunoglobulin (e.g. IgG1) Fc region, in which the fusion protein is a BCMA-Fc containing (1) a BCMA sequence containing any of the provided BCMA ECD sequences; and (2) an immunoglobulin Fc region. Thus, among provided embodiments are BCMA-Fc fusion proteins containing (1) a BCMA sequence containing or consisting of any of the above described BCMA ECD polypeptide sequences, such as variant BCMA polypeptide; and (2) an immunoglobulin Fc region. In some embodiments, the BCMA-Fc fusion is a variant BCMA-Fc fusion containing or consisting of any of the above described variant BCMA polypeptides and an immunoglobulin Fc region.

[0287] In some embodiments, provided herein is a variant BCMA-Fc fusion sequence that contains (1) a BCMA ECD sequence that contains the sequence set forth in any one of SEQ ID NOS: 357-435, and (2) an immunoglobulin Fc region. In some embodiments, provided herein is a variant BCMA-Fc fusion sequence that contains (1) a BCMA ECD sequence that consist or consists essentially of the sequence set forth in any one of SEQ ID NOS: 357-435, and (2) an immunoglobulin Fc region.

[0288] In some embodiments, provided herein is a variant BCMA-Fc fusion sequence that contains (1) a BCMA ECD sequence that contains the sequence set forth in any one of SEQ ID NOS: 357-435 and (2) an immunoglobulin Fc region. In some embodiments, provided herein is a variant BCMA-Fc fusion sequence that contains (1) a BCMA ECD sequence that consists or consists essentially of the sequence set forth in any one of SEQ ID NOS: 357-435 and (2) an immunoglobulin Fc region.

[0289] In provided embodiments of a BCMA-Fc, the immunoglobulin Fc region can be a wild-type Fc of an immunoglobulin, such as an IgG1 Fc. In some cases, the Fc region can be a variant Fc that lacks effector function (also called “effectorless Fc”). Exemplary Fc regions and variants thereof in provided BCMA-Fc fusion proteins are described below in Section IV.C.

[0290] In some embodiments, the Fc is murine or human Fc. In some embodiments, the Fc is a mammalian or human IgG1, lgG2, lgG3, or lgG4 Fc regions.

[0291] In some embodiments, the Fc is derived from IgG1, such as human IgG1. In some embodiments, the Fc is an IgG1 Fc set forth in SEQ ID NO: 586 having an allotype containing residues Glu (E) and Met (M) at positions 356 and 358 by EU numbering. In some embodiments, the Fc comprises the amino acid sequence set forth in SEQ ID NO: 586 or a sequence of amino acids that exhibits at least 85%, 86%, 87%, 88%, 89%, 90%, 91%, 92%, 93%, 94%, 95%, 96%, 97%, 98%, 99% or more sequence identity to SEQ ID NO: 586. In other embodiments, the Fc is IgG1 Fc that contains amino acids of the human G1m1 allotype, such as residues containing Asp (D) and Leu (L) at positions 356 and 358, e.g. as set forth in SEQ ID NO:597. Thus, in some cases, an Fc provided herein can contain amino acid substitutions E356D and M358L to reconstitute residues of allotype G1 ml. In some embodiments, the Fc comprises the amino acid sequence set forth in SEQ ID NO: 597 or a sequence of amino acids that exhibits at least 85%, 86%, 87%, 88%, 89%, 90%, 91%, 92%, 93%, 94%, 95%, 96%, 97%, 98%, 99% or more sequence identity to SEQ ID NO: 597.

[0292] In some embodiments, the Fc region has the amino acid sequence set forth in SEQ ID NO:597.

[0293] In some embodiments, the variant Fc comprises the sequence set forth in SEQ ID NO: 755. In some embodiments, the variant Fc comprises the sequence set forth in SEQ ID NO:756. In some embodiments, an Fc region used in a construct provided herein can further lack a C-terminal lysine residue.

[0294] In some embodiments, the Fc is derived from IgG2, such as human IgG2. In some embodiments, the Fc comprises the amino acid sequence set forth in SEQ ID NO: 726 or a sequence of amino acids that exhibits at least 85%, 86%, 87%, 88%, 89%, 90%, 91%, 92%, 93%, 94%, 95%, 96%, 97%, 98%, 99% or more sequence identity to SEQ ID NO: 726.

[0295] In some embodiments, the Fc is derived from IgG4, such as human IgG4. In some embodiments, the Fc comprises the amino acid sequence set forth in SEQ ID NO: 727 or a sequence of amino acids that exhibits at least 85%, 86%, 87%, 88%, 89%, 90%, 91%, 92%, 93%, 94%, 95%, 96%, 97%, 98%, 99% or more sequence identity to SEQ ID NO: 727. In some embodiments, the IgG4 Fc is a stabilized Fc in which the CH3 domain of human IgG4 is substituted with the CH3 domain of human IgG1 and which exhibits inhibited aggregate formation, an antibody in which the CH3 and CH2 domains of human IgG4 are substituted with the CH3 and CH2 domains of human IgG1, respectively, or an antibody in which arginine at position 409 indicated in the EU index proposed by Kabat et al. of human IgG4 is substituted with lysine and which exhibits inhibited aggregate formation (see e.g. U.S. Pat. No. 8,911,726. In some embodiments, the Fc is an IgG4 containing the S228P mutation, which has been shown to prevent recombination between a therapeutic antibody and an endogenous IgG4 by Fab-arm exchange (see e.g. Labrijin et al. (2009) Nat. Biotechnol., 27(8): 767-71.) In some embodiments, the Fc comprises the amino acid sequence set forth in SEQ ID NO: 728 or a sequence of amino acids that exhibits at least 85%, 86%, 87%, 88%, 89%, 90%, 91%, 92%, 93%, 94%, 95%, 96%, 97%, 98%, 99% or more sequence identity to SEQ ID NO: 728.

[0296] In some embodiments, the Fc region is a variant Fc region in which a wild-type Fc is modified by one or more amino acid substitutions to reduce effector activity or to render the Fc inert for Fc effector function. Exemplary effectorless or inert mutations include those described herein, including in Section IV.C. In some embodiments, the Fc region of immunomodulatory proteins has an Fc region in which any one or more of amino acids at positions 234, 235, 236, 237, 238, 239, 270, 297, 298, 325, and 329 (indicated by EU numbering) are substituted with different amino acids compared to the native Fc region. Such alterations of Fc region include, for example, alterations such as deglycosylated chains (N297A and N297Q), IgG1-N297G, IgG1-L234A/L235A, IgG1-L234A/L235E/G237A, IgG1-A325A/A330S/P331S, IgG1-C226S/C229S, IgG1-C226S/C229S/E233P/L234V/L235A, IgG1-E233P/L234V/L235A/G236del/S267K, IgG1-L234F/L235E/P331S, IgG1-S267E/L328F, IgG2-V234A/G237A, IgG2-H268Q/V309L/A330S/A331S, IgG4-L235A/G237A/E318A, and IgG4-L236E described in Current Opinion in Biotechnology (2009) 20 (6), 685-691; alterations such as G236R/L328R, L235G/G236R, N325A/L328R, and N325LL328R described in WO 2008/092117; amino acid insertions at positions 233, 234, 235, and 237 (indicated by EU numbering); and alterations at the sites described in WO 2000/042072.

[0297] In some embodiments, the variant Fc region comprises the one or more amino acid modifications (e.g amino acid substitutions) is derived from a wild-type IgG1, such as a wild-type human IgG1. In some embodiments, the wild-type IgG1 Fc can be the Fc set forth in SEQ ID NO: 586 having an allotype containing residues Glu (E) and Met (M) at positions 356 and 358 by EU numbering. In some embodiments, the variant Fc region is derived from the amino acid sequence set forth in SEQ ID NO: 586. In other embodiments, the wild-type IgG1 Fc contains amino acids of the human Glml allotype, such as residues containing Asp (D) and Leu (L) at positions 356 and 358, e.g. as set forth in SEQ ID NO:597. Thus, in some cases, the variant Fc is derived from the amino acid sequence set forth in SEQ ID NO:597.

[0298] In some embodiments, the Fc region lacks the C-terminal lysine corresponding to position 232 of the wild-type or unmodified Fc set forth in SEQ ID NO: 586 or 597 (corresponding to K447del by EU numbering).

[0299] In some embodiments, the variant Fc region comprises a C5S amino acid modification of the wild-type or unmodified Fc region by numbering of SEQ ID NO: 586 (corresponding to C220S by EU numbering).

[0300] In some embodiments, the Fc region is a variant Fc that contains at least one amino acid substitution that is N82G by numbering of SEQ ID NO: 586 (corresponding to N297G by EU numbering). In some embodiments, the Fc further contains at least one amino acid substitution that is R77C or V87C by numbering of SEQ ID NO: 586 (corresponding to R292C or V302C by EU numbering). In some embodiments, the variant Fc region further comprises a C5S amino acid modification by numbering of SEQ ID NO: 586 (corresponding to C220S by EU numbering). For example, in some embodiments, the variant Fc region comprises the following amino acid modifications: N297G and one or more of the following amino acid modifications C220S, R292C or V302C by EU numbering (corresponding to N82G and one or more of the following amino acid modifications C5S, R77C or V87C with reference to SEQ ID NO:586), e.g., the Fc region comprises the sequence set forth in SEQ ID NO:598.

[0301] In some embodiments, the variant Fc contains the amino acid substitutions L234A/L235E/G237A, by EU numbering. In some embodiments, the variant Fc contains the amino acid substitutions A330S/P331S, by EU numbering. In some embodiments, the variant Fc contains the amino acid substitutions L234A/L235E/G237A/A330S/P331S (Gross et al. (2001) Immunity 15:289). In some embodiments, the variant Fc comprises the sequence set forth in SEQ ID NO: 757. In some embodiments, the variant Fc comprises the sequence set forth in SEQ ID NO:758. In some embodiments, an Fc region used in a construct provided herein can further lack a C-terminal lysine residue.

[0302] In some embodiments, the Fc region is a variant Fc that includes mutations L234A, L235E and G237A by EU numbering. In some embodiments, a wild-type Fc is further modified by the removal of one or more cysteine residue, such as by replacement of the cysteine residues to a serine residue at position 220 (C220S) by EU numbering. Exemplary inert Fc regions having reduced effector function are set forth in SEQ ID NO: 599 and SEQ ID NO:591, which are based on allotypes set forth in SEQ ID NO:586 or SEQ ID NO: 597, respectively. In some embodiments, an Fc region can further lack a C-terminal lysine residue. In some embodiments, the variant Fc region comprises one or more of the amino acid modifications C220S, L234A, L235E or G237A, e.g. the Fc region comprises the sequence set forth in SEQ ID NO:589, 591, 599 or 724. In some embodiments, the variant Fe comprises has the sequence set forth in SEQ ID NO: 589. In some embodiments, the variant Fc comprises has the sequence set forth in SEQ ID NO: 591. In some embodiments, the variant Fc comprises has the sequence set forth in SEQ ID NO: 599. In some embodiments, the variant Fc comprises has the sequence set forth in SEQ ID NO: 724.

[0303] In some embodiments, the Fc region is a variant Fc that has the sequence set forth in SEQ ID NO:589.

[0304] In some embodiments, the Fc region is a variant Fc region that comprises one or more of the amino acid modifications C220S, L235P, L234V, L235A, G236del or S267K, e.g. the Fc region comprises the sequence set forth in SEQ ID NO:722. In some embodiments, the Fc region lacks the C-terminal lysine corresponding to position 232 of the wild-type or unmodified Fc set forth in SEQ ID NO: 586 (corresponding to K447del by EU numbering).

[0305] In some embodiments, the Fc region is a variant Fc region that comprises one or more of the amino acid modifications C220S, R292C, N297G, V302C. In some embodiments, the Fc region lacks the C-terminal lysine corresponding to position 232 of the wild-type or unmodified Fc set forth in SEQ ID NO: 586 (corresponding to K447del by EU numbering). An exemplary variant Fc region is set forth in SEQ ID NO: 723.

[0306] In some embodiments, the variant Fc region comprises one or more of the amino acid modifications C220S/E233P/L234V/L235A/G236del/S267K. In some embodiments, the Fc region lacks the C-terminal lysine corresponding to position 232 of the wild-type or unmodified Fc set forth in SEQ ID NO: 586 (corresponding to K447del by EU numbering). An exemplary variant Fc region is set forth in SEQ ID NO: 725.

[0307] In some embodiments, the Fc region is a variant Fc region containing any combination of the Fc mutations in Table 4. In some embodiments, the Fc region is a variant Fc region having the sequence set forth in any one of the SEQ ID NOs in Table 4.

[0308] For example, a variant Fc region may be an effectorless Fc that exhibits reduced effector activity compared to a wild-type IgG1 set forth in SEQ ID NO:586 or SEQ ID NO:597. In some embodiments, the variant Fc comprises the sequence of amino acids set forth in any of SEQ ID NOS:591, 598, 599, 722, 589, 723, 724, or 725 or a sequence of amino acids that exhibits at least 85%, 86%, 87%, 88%, 89%, 90%, 91%, 92%, 93%, 94%, 95%, 96%, 97%, 98%, 99% or more sequence identity to any of SEQ ID NOS: 591, 598, 599722, 589, 723, 724, or 725. In some embodiments, the variant Fc has the sequence set forth in SEQ ID NO: 589.

[0309] In some embodiments, the BCMA polypeptide, such as the variant BCMA polypeptide, is directly linked to the Fc sequence. In some embodiments, the BCMA polypeptide, such as the variant BCMA polypeptide, is indirectly linked to the Fc sequence, such as via a linker. In some embodiments, one or more “peptide linkers” link the BCMA polypeptide (e.g. variant BCMA polypeptide) and the Fc region. In some embodiments, a peptide linker can be a single amino acid residue or greater in length. In some embodiments, the peptide linker has at least one amino acid residue but is no more than 20, 19, 18, 17, 16, 15, 14, 13, 12, 11, 10, 9, 8, 7, 6, 5, 4, 3, 2, or 1 amino acid residues in length. Exemplary linkers are set forth in subsection “Linker.”

[0310] In some embodiments, the linker is (in one-letter amino acid code): GGGGS (“4GS”; SEQ ID NO: 593) or multimers of the 4GS linker, such as repeats of 2, 3, 4, or 5 4GS linkers. In some embodiments, the peptide linker is the peptide linker is (GGGGS)₂ (SEQ ID NO: 594), (GGGGS)₃ (SEQ ID NO: 595), (GGGGS)₄ (SEQ ID NO: 600) or (GGGGS)₅(SEQ ID NO: 671). In some embodiments, the linker also can include a series of alanine residues alone or in addition to another peptide linker (such as a 4GS linker or multimer thereof). In some embodiments, the linker (in one-letter amino acid code) is GSGGGGS (SEQ ID NO: 590) or GGGGSSA (SEQ ID NO: 596). In some examples, the linker is a 2×GGGGS followed by three alanines (GGGGSGGGGSAAA; SEQ ID NO:721).

[0311] In some embodiments, there is a provided a BCMA-Fc fusion protein that is a dimer formed by two identical BCMA Fc polypeptides (e.g. variant BCMA polypeptide) as described linked to an Fc domain. In some embodiments, identical species of any of the provided BCMA-Fc fusion polypeptides, e.g. variant BCMA-Fc fusion, will be dimerized to create a homodimer. In some embodiments, the dimer is a homodimer in which the two BCMA Fc polypeptides, e.g. variant BCMA Fc polypeptides, are the same. For generating a homodimeric Fc molecule, the Fc region is one that is capable of forming a homodimer with a matched Fc region by co-expression of the individual Fc regions in a cell.

[0312] Also provided are nucleic acid molecules encoding the BCMA-Fc fusion proteins, e.g. variant BCMA-Fc fusion protein. In some embodiments, for production of an Fc fusion protein, a nucleic acid molecule encoding a BCMA-Fc fusion protein, e.g. variant BCMA-Fc fusion protein is inserted into an appropriate expression vector. The resulting BCMA-Fc fusion protein, e.g. variant BCMA-Fc fusion protein can be expressed in host cells transformed with the expression where assembly between Fc domains occurs by interchain disulfide bonds formed between the Fc moieties to yield dimeric, such as divalent, BCMA-Fc fusion proteins. The resulting Fc fusion proteins can be easily purified by affinity chromatography over Protein A or Protein G columns.

[0313] In embodiments, when produced and expressed from a cells, the provided immunomodulatory protein, such as a BCMA-Fc, is a homodimer containing two identical polypeptide chains. FIG. 15 depicts the structure of an exemplary BCMA-Fc fusion protein provided herein.

### III. Multi-Domain Immunomodulatory Proteins

[0314] Provided herein are multi-domain immunomodulatory proteins that contains (1) one or more B cell inhibitory molecule (BIM) that bind to a ligand of a B cell stimulatory receptor and (2) one or more T cell inhibitory molecule (BIM) that binds to a T cell stimulatory receptor or a ligand of a T cell stimulatory receptor. Among provided multi-domain immunomodulatory proteins are those in which the BIM antagonizes, such as reduces or inhibits, the activity of a B cell stimulatory receptor, and in which the TIM antagonizes, such as reduces or inhibits, the activity of a T cell stimulatory receptor. Thus, the provided immunomodulatory proteins combine B and T cell inhibitors into a single molecule. In some embodiments, the BIM and TIM are linked directly or indirectly. The provided immunomodulatory protein can be a fusion protein in which the multidomain BIM and TIM components are further linked to another moiety, such as a multimerization domain or half-life extending molecule. In particular embodiments, the multidomain immunomodulatiory protein is a BIM/TIM Fc fusion protein. The provided molecules can be used to modulate B and T cell pathways to thereby treat autoimmune diseases, particularly automimmune diseases in which etiology is associated with B and T cell responses.

[0315] In some embodiments, the B cell stimulatory receptor is a receptor expressed on B cells that stimulates B cell responses, such as B cell maturation and differentiation. The B cell stimulatory receptor may be BAFF-R, BCMA and/or TAC. In particular embodiments, the provided multidomain immunomodulatory proteins antagonize the activity of one or more of BAFF-R, BCMA or TACI. In some embodiments, the BIM binds to a ligand of BAFF-R, BCMA or TACI. The ligand may be BAFF or APRIL, which are homotrimeric molecules common to members of the TNF superfamily. BAFF and APRIL are both mainly expressed by myeloid cells, and have been reported to act as costimulatory B cell factors. BAFF and APRIL share two receptors TACI and BCMA; BAFF is also able to bind and stimulate BAFF-R. In some cases, the ligand may be a heterotrimer of BAFF and APRIL. For example, heterotrimeric complexes of APRIL and BAFF are found in serum, particularly in subjects with autoimmune disease such as those with systemic immune-based rheumatic diseases.

[0316] In some embodiments, the T cell stimulatory receptors comprises an immunoreceptor tyrosine-based activation motif (ITAM) or interacts with an adaptor protein involved in signal transduction pathways in a T cell to transduce activation signals. The T cell stimulatory receptor may be a costimulatory receptor expressed on T cells, such as CD28 or ICOS. In particular embodiments, the provided multidomain immunomodulatory proteins antagonize the activity of the T cell stimulatory receptor, such as a T cell costimulatory receptor, e.g. CD28 or ICOS. The TIM may bind to the costimulatory receptor or to a ligand of the costimulatory receptor. In some embodiments, the provided multi-domain immunomodulatory proteins can be generated so that the TIM binds the T cell stimulatory receptor directly. For example, the TIM may be a CD28 or ICOS binding molecule. In other embodiments, the provided multi-domain immunomodulatory proteins can be generated so that the TIM binds a ligand of the T cell stimulatory receptor, and thereby indirectly antagonizes or inhibits the T cell stimulatory receptor. For example, the TIM binds to CD80 or CD86, which are ligands of CD28.

[0317] In some embodiments, the one or more TIM and/or BIM independently include an antibody or an antigen-binding antibody fragment. In some aspects, the TIM and/or BIM can be a human antibody and/or an antibody that binds a human protein.

[0318] In some embodiments, at least one of the TIM or BIM is not an antibody or antigen-binding fragment. In some embodiments, at least one of the TIM or BIM is or contains an extracellular domain of a cell surface molecule expressed on immune cells. For example, certain members of the non-antibody immunoglobulin superfamily (IgSF) are expressed on T cells or regulate activity of T cells. These include, for example, certain T cell costimulatory molecules or ligands thereof. In some cases, the TIM includes an (IgSF) domain (IgD) of an IgSF member (e.g. wild-type IgD), or a variant IgD (hereinafter called “vIgD”) in which is contained one or more amino acid modifications (e.g. substitutions) in an IgD. Likewise, certain members of the TNF receptor superfamily are expressed on B cells or regulate activity of B cells. These include, for example, certain B cell stimulatory receptors, such as TACI or BCMA. In some cases, the BIM include a TNF receptor domain (TD) of a TNFR superfamily member (e.g. wild-type TD), or a variant TD (hereinafter called “vTD”) in which is contained one more amino acid modifications (e.g. substitutions) in an TD.

[0319] In some embodiments, the BIM can bind to a ligand of a B cell stimulatory receptor with at least a certain binding activity, such as binding affinity, as measured by any of a number of known methods. In some embodiments, the TIM can bind to a T cell stimulatory receptor or a ligand of a T cell stimulatory receptor with at least a certain binding activity, such as binding affinity, as measured by any of a number of known methods. In some embodiments, the affinity is represented by an equilibrium dissociation constant (K_{D}) or is represented by EC₅₀. A variety of assays are known for assessing binding activity, including binding affinity, and/or determining whether a binding molecule (e.g., a TIM or BIM) specifically binds to a particular binding partner. In some embodiments, a BIAcore® instrument can be used to determine the binding kinetics and constants of a complex between two proteins using surface plasmon resonance (SPR) analysis (see, e.g., Scatchard et al., Ann. N. Y. Acad. Sci. 51:660, 1949; Wilson, Science 295:2103, 2002; Wolff et al., Cancer Res. 53:2560, 1993; and U.S. Pat. Nos. 5,283,173, 5,468,614, or the equivalent). In other embodiments, Bio-Layer Interferometry (BLI) using a ForteBio Octet system may be used, such as with streptavidin coated sensor and biotinylated recombinant protein domain. Other suitable assays for measuring the binding of one protein to another include, for example, immunoassays such as enzyme linked immunosorbent assays (ELISA) and radioimmunoassays (RIA), or determination of binding by monitoring the change in the spectroscopic or optical properties of the proteins through fluorescence, UV absorption, circular dichroism, or nuclear magnetic resonance (NMR). Other exemplary assays include, but are not limited to, Western blot, ELISA, analytical ultracentrifugation, spectroscopy, flow cytometry, sequencing and other methods for detection of expressed nucleic acids or binding of proteins.

[0320] In some embodiments, the BIM and TIM independently exhibit a binding affinity for a binding partner with a K_{D} (i.e., an equilibrium dissociation constant of a particular binding interaction with units of M; equal to the ratio of the off-rate [k_{off} or k_{d}] to the on-rate [kₒₙ or kₐ] for this association reaction, assuming bimolecular interaction) of equal to or less than 10⁻⁵ M. For example, the equilibrium dissociation constant K_{D} ranges from 10⁻⁶ M to 10⁻¹² M, such as 10⁻⁷ M to 10⁻¹¹ M, 10⁻⁸ M to 10⁻¹⁰ M, or 10⁻⁹ M to 10⁻¹⁰ M. The on-rate (association rate constant; kₒₙ or kₐ; units of 1/Ms) and the off-rate (dissociation rate constant; k_{off} or k_{d}; units of 1/s) can be determined using any of the assay methods known in the art, for example, surface plasmon resonance (SPR).

[0321] In some embodiments, the BIM exhibits a binding affinity for a ligand of a B cell stimulatory receptor that is from or from about 0.001 nM to 1000 nM, such as from or from about 0.01 nM to about 500 nM, from or from about 0.01 nM to about 400 nM, from or from about 0.01 nM to about 100 nM, from or from about 0.01 nM to about 50 nM, from or from about 0.01 nM to about 10 nM, from or from about 0.01 nM to about 1 nM, from or from about 0.01 nM to about 0.1 nM, is from or from about 0.1 nM to about 500 nM, from or from about 0.1 nM to about 400 nM, from or from about 0.1 nM to about 100 nM, from or from about 0.1 nM to about 50 nM, from or from about 0.1 nM to about 10 nM, from or from about 0.1 nM to about 1 nM, from or from about 0.5 nM to about 200 nM, from or from about 1 nM to about 500 nM, from or from about 1 nM to about 100 nM, from or from about 1 nM to about 50 nM, from or from about 1 nM to about 10 nM, from or from about 2 nM to about 50 nM, from or from about 10 nM to about 500 nM, from or from about 10 nM to about 100 nM, from or from about 10 nM to about 50 nM, from or from about 50 nM to about 500 nM, from or from about 50 nM to about 100 nM or from or from about 100 nM to about 500 nM. In certain embodiments, the binding affinity of the BIM for the inhibitory receptor is at or less than or about 400 nM, 300 nM, 200 nM, 100 nM, 50 nM, 40 nM, 30 nM, 25 nM, 20 nM, 19 nM, 18 nM, 17 nM, 16 nM, 15 nM, 14 nM, 13 nM, 12 nM, 11 nM, 10 nM, 9 nM, 8 nM, 7 nM, 6 nM, 5 nM, 4 nM, 3 nM, 2 nM, or 1 nM or less.

[0322] In some embodiments, the TIM exhibits a binding affinity for a T cell stimulatory receptor or a ligand of a T cell stimulatory receptor that is from or from about 0.001 nM to about 1000 nM, such as from or from about 0.01 nM to about 500 nM, from or from about 0.01 nM to about 400 nM, from or from about 0.01 nM to about 100 nM, from or from about 0.01 nM to about 50 nM, from or from about 0.01 nM to about 10 nM, from or from about 0.01 nM to about 1 nM, from or from about 0.01 nM to about 0.1 nM, is from or from about 0.1 nM to about 500 nM, from or from about 0.1 nM to about 400 nM, from or from about 0.1 nM to about 100 nM, from or from about 0.1 nM to about 50 nM, from or from about 0.1 nM to about 10 nM, from or from about 0.1 nM to about 1 nM, from or from about 0.5 nM to about 200 nM, from or from about 1 nM to about 500 nM, from or from about 1 nM to about 100 nM, from or from about 1 nM to about 50 nM, from or from about 1 nM to about 10 nM, from or from about 2 nM to about 50 nM, from or from about 10 nM to about 500 nM, from or from about 10 nM to about 100 nM, from or from about 10 nM to about 50 nM, from or from about 50 nM to about 500 nM, from or from about 50 nM to about 100 nM or from or from about 100 nM to about 500 nM. In certain embodiments, the binding affinity of the TIM for the stimulatory receptor or a ligand of the T cell stimulatory receptor is at or less than or about 400 nM, 300 nM, 200 nM, 100 nM, 50 nM, 40 nM, 30 nM, 25 nM, 20 nM, 19 nM, 18 nM, 17 nM, 16 nM, 15 nM, 14 nM, 13 nM, 12 nM, 11 nM, 10 nM, 9 nM, 8 nM, 7 nM, 6 nM, 5 nM, 4 nM, 3 nM, 2 nM, or 1 nM or less.

[0323] In some embodiments, the TIM, or the multidomain immunomodulatory protein containing the TIM, is not an agonist of the T cell stimulatory (e.g. costimulatory) receptor. In some embodiments, the TIM, or the multidomain immunodulatory protein containing the TIM, binds to a T cell costimulatory receptor, e.g. CD28 or ICOS, but exhibits a relatively low affinity for the T cell costimulatory receptor. In some embodiments, the TIM has a binding affinity for the T cell costimulatory receptor of greater than 1×10⁻⁹ M, such as between at or about 1×10⁻⁷ M and at or about 1×10⁻⁹ M. In some embodiments, the TIM has a binding affinity for the T cell costimulatory receptor of at or about 1×10⁻⁷ M, at or about 2.5×10⁻⁷ M, at or about 5×10⁻⁷ M, at or about 7.5×10⁻⁷ M, at or about 1×10⁻⁸ M, at or about 2.5×10⁻⁸ M, at or about 5×10⁻⁸ M, at or about 7.5×10⁻⁸ M, or at or about 1×10⁻⁹ M, or any value between any of the foregoing.

[0324] In some embodiments, the TIM of the provided multidomain immunomodulatory proteins does not directly bind to a T cell costimulatory receptor. In some embodiments, the TIM of the provided multidomain immunomodulatory proteins binds to a ligand of the T cell costimulatory receptor.

[0325] In some embodiments, the provided multi-domain immunomodulatory proteins can include the BIM and TIM in various configurations or formats, including formats with one or more further moieties. In some embodiments, the provided immunomodulatory proteins include polypeptides in which the one or more BIM is N-terminal to the TIM. In some embodiments, the one or more BIM is C-terminal to the TIM. The one or more BIM and the one or more TIM can be linked directly or indirectly, via a linker. In some embodiments, the immunomodulatory proteins can be formatted as multimeric molecules via fusion with a multimerization domain, such as an Fc protein. In some embodiments, the multi-domain immunomodulatory proteins can be formatted as multimeric molecules, e.g., dimeric, trimer, tetrameric, or pentameric molecules. In some embodiments, the immunomodulatory proteins are formatted as a monomeric molecules containing single polypeptide fusions of the one or more BIM and the one or more TIM. FIG. 16 depicts exemplary formats and configurations, all of which may be encompassed by a provided multi-domain immunomodulatory protein.

[0326] In the subsections below, exemplary BIM and TIM components of the provided multi-domain immunomodulatory protein are described, as are exemplary formats for such immunomodulatory proteins.

[0327] A. B Cell Inhibitory Molecule (BIM)

[0328] In some embodiments, the provided immunomodulatory protein contains a BIM that binds to one or more ligands of a B cell stimulatory receptor. In some embodiments, the B cell stimulatory receptor is a member of the TNFRSF. In some embodiments, the one or more B cell stimulatory receptor is TACI and BCMA. In some embodiments, the ligand of the B cell stimulatory receptor is BAFF or APRIL. In some embodiments the BIM binds to BAFF, APRIL and/or a BAFF/APRIL heterotrimer. In some embodiments the BIM is able to binds to BAFF, APRIL and a BAFF/APRIL heterotrimer.

[0329] In some embodiments, the BIM is an antibody or antigen-binding fragment that binds to the ligand of a B cell stimulatory receptor. In some embodiments, the BIM is an antibody or antigen-binding fragment that binds BAFF and/or APRIL, such as a human BAFF and/or human APRIL.

[0330] In some embodiments, the BIM is or contains a binding partner of the ligand of the B cell stimulatory receptor. In some embodiments, the multi-domain immunomodulatory protein provided herein are soluble proteins and/or do not contain a portion that includes a transmembrane domain. Those of skill will appreciate that cell surface proteins, including proteins of the TNFRSF such as B cell stimulatory receptors, e.g. BCMA and TACI, typically have an intracellular domain, a transmembrane domain, and extracellular domain (ECD), and that a soluble form of such proteins can be made using the extracellular domain or an immunologically active subsequence thereof. Thus, in some embodiments, the BIM lacks a transmembrane domain or a portion of the transmembrane domain of the B cell stimulatory receptor, e.g. BCMA or TACI. In some embodiments, the BIM lacks the intracellular (cytoplasmic) domain or a portion of the intracellular domain of the B cell stimulatory receptor, e.g. BCMA or TACI. In some embodiments, the BIM only contains the ECD domain or a portion thereof containing a TD, such as a CRD, or specific binding fragments thereof.

[0331] For example, in some aspects, the BIM is or contains an ECD of a B cell stimulatory receptor, or a specific binding portion or fragment thereof containing at least one TD (e.g. at least one CRD), that binds to a ligand of the B cell stimulatory receptor. For example, the BIM can contain an ECD of TACI or BCMA, or a specific binding portion or fragment of TACI or BCMA containing at least one TD (e.g. at least one CRD), that binds to APRIL, BAFF and/or an APRIL/BAFF heterotrimer. In some embodiments, the BIM consists or consists essentially of an ECD of a B cell stimulatory receptor, or a specific binding portion or fragment thereof containing at least one TD (e.g. at least one CRD), such as consists or consists essentially of the ECD of TACI or BCMA or a specific binding portion or fragment of the ECD of TACI or BCMA that contains at least one TD (e.g. at least one CRD). In some embodiments, the BIM is less than the full length sequence of the ECD of the B cell stimulatory receptor. In some embodiments, the BIM is or only contains one CRD or a specific binding fragment of the CRD. In some embodiments, the BIM consists or consists essentially of a CRD of a B cell stimulatory receptor, such as consists or consists essentially of only one CRD of TACI or BCMA. In some embodiments, the sequence of the BIM containing an ECD or binding portion or fragment thereof containing a TD (e.g. at least one CRD) is a mammalian sequence that includes, but is not limited to, human, mouse, cynomolgus monkey, or rat. In some embodiments, the BIM sequence is human and/or binds a human protein.

[0332] In some aspects, the BIM is or includes a vTD that is an affinity-modified domain that exhibits increased binding activity, such as increased binding affinity, for the ligand of the B cell stimulatory receptor compared to the binding activity of the unmodified or wild-type TD for the same molecule. In some embodiment, the BIM contains a vTD with one or more amino acid substitutions compared to a TD of a TNFRSF member, e.g. BCMA or TACI, in which, the one or more amino acid substitutions confer or result in increased binding affinity to a cognate ligand of the B cell stimulatory receptor.

[0333] In some embodiments, the BIM is or contains a vTD that contains one or more amino acids modifications, such as one or more substitutions (alternatively, “mutations” or “replacements”), deletions or additions, relative to a wild-type or unmodified TD of a binding partner of a ligand of the B cell stimulatory receptor. In some aspects, the vTD contains up to 1, 2, 3, 4, 5, 6, 7, 8, 9, 10, 11, 12, 13, 14, 15, 16, 17, 18, 19 or 20 amino acid modifications, such as amino acid substitutions, deletions or additions in an TD domain of an TNFRSF binding partner of a B cell stimulatory receptor. The modifications (e.g., substitutions) can be in a CRD. In some embodiments, the vTD has up to 1, 2, 3, 4, 5, 6, 7, 8, 9, 10, 11, 12, 13, 14, 15, 16, 17, 18, 19, or 20 amino acid modifications (e.g., substitutions) in the CRD or specific binding fragment thereof. In some embodiments, the vTD has at least about 85%, 86%, 86%, 88%, 89%, 90%, 91%, 92%, 93%, 94%, 95%, 96%, 97%, 98%, or 99% sequence identity with the wild-type or unmodified TD or specific binding fragment thereof.

[0334] Non-limiting examples of a BIM in the provided multidomain immunomodulatory proteins are described in the following subsections. Any of the described BIMs herein can be combined with a TIM as described in Section III.B.

[0335] 1. TACI

[0336] In some embodiments, the BIM is or contains a wild-type TACI ECD or a specific binding portion or fragment thereof containing at least one TD (e.g. at least one CRD) that binds to APRIL, BAFF and/or an APRIL/BAFF heterotrimer. In some embodiments, the BIM is or contains a variant TACI ECD or a specific binding portion or fragment thereof containing at least one TD (e.g. at least one CRD) that binds to APRIL, BAFF and/or an APRIL/BAFF heterotrimer. In some embodiments, the BIM is a TACI polypeptide or variant thereof with any of the sequences set forth herein.

[0337] TACI is a tumor necrosis factor receptor family member characterized by having an extracellular domain (ECD) containing cysteine-rich pseudo-repeat domains (CRDs). TACI is a membrane bound receptor, which has an extracellular domain containing two cysteine-rich pseudorepeats (CRD1 and CRD2), a transmembrane domain and a cytoplasmic domain that interacts with CAML (calcium-modulator and cyclophilin ligand), an integral membrane protein located at intracellular vesicles which is a co-inducer of NF-AT activation when overexpressed in Jurkat cells. TACI is associated with B cells and a subset of T cells. The TACI receptor binds two members of the tumor necrosis factor (TNF) ligand family. One ligand is designated BAFF (B cell Activating Factor of the TNF Family), and also is variously designated as ZTNF4, “neutrokine-α,” “BLyS,” “TALL-1,” and “THANK” (Yu et al., international publication No. WO98/18921 (1998), Moore et al., Science 285:269 (1999); Mukhopadhyay et al., J. Biol. Chem. 274:15978 (1999); Schneider et al., J. Exp. Med. 189:1747 (1999); Shu et al., J. Leukoc. Biol. 65:680 (1999)). The other ligand has been designated as APRIL, and also is variously designated as “ZTNF2” and “TNRF death ligand-1” (Hahne et al., J. Exp. Med. 188:1185 (1998); Kelly et al., Cancer Res. 60:1021 (2000)). Both ligands are also bound by the B-cell maturation receptor (BCMA) (Gross et al., Nature 404:995 (2000)). Binding of TACI receptor to its ligands BAFF or APRIL stimulates B cell responses, including T cell-independent B cell antibody responses, isotype switching, and B cell homeostasis.

[0338] The amino acid sequence of full-length TACI is set forth in SEQ ID NO:666. The protein is a type III membrane protein and lacks a signal peptide; following expression in eukaryotic cells the N-terminal methionine is removed. In some embodiments, a mature TACI protein does not contain the N-terminal methionine as set forth in SEQ ID NO:666. The extracellular domain of TACI (amino acid residues 1-166 of SEQ ID NO:666; ECD set forth in SEQ ID NO:709) contains two cysteine rich domain (CRDs, hereinafter also called a tumor necrosis family receptor domain or TD), each of which exhibit affinity for binding to BAFF and APRIL. The first cysteine rich domain (CRD1) contains amino acid residues 34-66 of the sequence set forth in SEQ ID NO:709. The second cysteine rich domain (CRD2) corresponds to amino acids 71-104 of the sequence set forth in SEQ ID NO:709. TACI also contains a stalk region of about 60 amino acids following the second cysteine repeat in the extracellular domain, corresponding to amino acid residues 105-165 of the sequence set forth in SEQ ID NO:709.

[0339] In some embodiments, the BIM is a variant TACI polypeptide that contains one or more amino acid modifications, such as one or more substitutions (alternatively, “mutations” or “replacements”), deletions or additions in the extracellular domain of a reference TACI polypeptide, such as a wild-type or unmodified TACI polypeptide containing a CRD(s) (hereinafter also called TDs). Thus, a provided BIM that is a variant TACI polypeptide is or comprises a variant TD (“vTD”) in which the one or more amino acid modifications (e.g. substitutions) is in a CRD. In some embodiments, the one or more amino acids modifications, such as one or more substitutions (alternatively, “mutations” or “replacements”), deletions or addition, is in the CRD1 region. In some embodiments, the one or more amino acids modifications, such as one or more substitutions (alternatively, “mutations” or “replacements”), deletions or addition, is in the CRD2 region. In some embodiments, the one or more amino acids modifications, such as one or more substitutions (alternatively, “mutations” or “replacements”), deletions or addition, is in amino acids within both the CRD1 and CRD2 regions.

[0340] In some embodiments, the reference (e.g. unmodified) TACI sequence is a wild-type TACI sequence or is a portion thereof that contains one or both CRDs. In some embodiments, the reference (e.g., unmodified) TACI is or comprises the extracellular domain (ECD) of TACI or a portion thereof containing one or both CRD domains. In some embodiments, the extracellular domain of a reference (e.g., unmodified) TACI polypeptide comprises a CRD1 and CRD2. However, the variant TACI polypeptide need not comprise both the CRD1 and the CRD2. In some embodiments, the variant TACI polypeptide comprises or consists essentially of the CRD1 or a specific binding fragment thereof. In some embodiments, the variant TACI polypeptide comprises or consists essentially of the CRD2 or specific binding fragments thereof. In some embodiments, the variant TACI is a soluble polypeptide and lacks a transmembrane domain. In some embodiments, the variant TACI polypeptide further comprises a transmembrane domain and, in some cases, also a cytoplasmic domain.

[0341] In some embodiments, the reference (e.g., unmodified) TACI sequence is a mammalian TACI sequence. In some embodiments, the reference (e.g., unmodified) TACI sequence can be a mammalian TACI that includes, but is not limited to, human, mouse, cynomolgus monkey, or rat. In some embodiments, the reference (e.g., unmodified) TACI sequence is human. The extracellular domain of an exemplary human TACI sequence is set forth in SEQ ID NO:709.

[0342] In some embodiments, the reference (e.g., unmodified) TACI sequence has (i) the sequence of amino acids set forth in SEQ ID NO:709 or a sequence thereof that lacks the N-terminal methionine, (ii) a sequence of amino acids that exhibits at least 85%, 86%, 87%, 88%, 89%, 90%, 91%, 92%, 93%, 94%, 95%, 96%, 97%, 98%, 99% or more sequence identity to SEQ ID NO:709 and that binds to APRIL, BAFF or an APRIL/BAFF heterotrimer, or (iii) is a fragment or portion of (i) or (ii) containing a CRD1 and/or CRD2, in which the portion binds to APRIL, BAFF or an APRIL/BAFF heterotrimer. In some embodiments, the reference (e.g., unmodified) TACI sequence lacks the N-terminal methionine as set forth in SEQ ID NO: 709.

TACI Extracellular Domain (ECD):
SEQ ID NO: 709
MSGLGRSRRGGRSRVDQEERFPQGLWTGVAMRSCP
EEQYWDPLLGTCMSCKTICNHQSQRTCAAFCRSLS
CRKEQGKFYDHLLRDCISCASICGQHPKQCAYFCE
NKLRSPVNLPPELRRQRSGEVENNSDNSGRYQGLE
HRGSEASPALPGLKLSADQVALVYST

[0343] In some embodiments, the reference (e.g. unmodified) TACI sequence is an extracellular domain sequence of TACI that is a portion of the ECD that contains an N-terminal deletion relative to the sequence of amino acids set forth in SEQ ID NO:709. In some embodiments, the N-terminal deletion is deletion of N-terminal amino acid residues 1-28 corresponding to residues set forth in SEQ ID NO:709. In some embodiments, the N-terminal deletion is deletion of N-terminal amino acid residues 1-29 corresponding to residues set forth in SEQ ID NO:709. In some embodiments, the N-terminal deletion is deletion of N-terminal amino acid residues 1-30 corresponding to residues set forth in SEQ ID NO:709. In some embodiments, the N-terminal deletion is deletion of N-terminal amino acid residues 1-31 corresponding to residues set forth in SEQ ID NO:709. In some embodiments, the N-terminal deletion is deletion of N-terminal amino acid residues 1-32 corresponding to residues set forth in SEQ ID NO:709. In some embodiments, the N-terminal deletion is deletion of N-terminal amino acid residues 1-33 corresponding to residues set forth in SEQ ID NO:709.

[0344] In some of any of the provided embodiments, the reference (e.g. unmodified) TACI sequence is an ECD portion that contains deletion of one or more residues of the stalk portion of the TACI extracellular domain. In some embodiments, the reference (e.g. unmodified) TACI sequence is an ECD portion that lacks one or more contiguous C-terminal amino acid residues beginning at residue 105 and up to or including amino acid residue 166 corresponding to residues of the ECD sequence set forth in SEQ ID NO:709. In some embodiments, 1, 2, 3, 4, 5, 6, 7, 8, 9, 10, 11, 12, 13, 14, 15, 16, 17, 18, 19, 20, 21, 22, 23, 24, 25, 26, 27, 28, 29, 30, 31, 32, 33, 34, 35, 36, 37, 38, 39, 40, 41, 42, 43, 44, 45, 46, 47, 48, 49, 50, 51, 52, 53, 54, 55, 56, 57, 58, 59, 60, 61 or 62 of the ECD sequence is deleted.

[0345] In some embodiments, the reference (e.g. unmodified) TACI sequence contains an ECD portion having a contiguous sequence of amino acids that includes the CRD1 and/or CRD2 (e.g. CRD1 and CRD2 or CRD2 only) and only a segment or portion of the stalk sequence. Suitable stalk segments include one or more amino acids of amino acid residues 105 to 154 of SEQ ID NO:709. For example, the stalk segment can consist of the following with reference to SEQ ID NO: 709: amino acid residue 105, amino acid residues 105 to 106, amino acid residues 105 to 107, amino acid residues 105 to 108, amino acid residues 105 to 109, amino acid residues 105 to 110, amino acid residues 105 to 111, amino acid residues 105 to 112, amino acid residues 105 to 113, amino acid residues 105 to 114, amino acid residues 105 to 115, amino acid residues 105 to 116, amino acid residues 105 to 117, amino acid residues 105 to 118, amino acid residues 105 to 119, amino acid residues 105 to 120, amino acid residues 105 to 121, amino acid residues 105 to 122, amino acid residues 105 to 123, amino acid residues 105 to 124, amino acid residues 105 to 125, amino acid residues 105 to 126, amino acid residues 105 to 127, amino acid residues 105 to 128, amino acid residues 105 to 129, amino acid residues 105 to 130, amino acid residues 105 to 131, amino acid residues 105 to 132, amino acid residues 105 to 133, amino acid residues 105 to 134, amino acid residues 105 to 135, amino acid residues 105 to 136, amino acid residues 105 to 137, amino acid residues 105 to 138, amino acid residues 105 to 139, amino acid residues 105 to 140, amino acid residues 105 to 141, amino acid residues 105 to 142, amino acid residues 105 to 143, amino acid residues 105 to 144, amino acid residues 105 to 145, amino acid residues 105 to 146, amino acid residues 105 to 147, amino acid residues 105 to 148, amino acid residues 105 to 149, amino acid residues 105 to 150, amino acid residues 105 to 151, amino acid residues 105 to 152, amino acid residues 105 to 153, and amino acid residues 105 to 154.

[0346] In some embodiments, the reference (e.g. unmodified) TACI sequence lacks or is mutated in one or more potential furin cleavage sites. In some cases, the reference (e.g. unmodified) TACI sequence is an ECD or portion that in which the arginine residue at position 119 is mutated, e.g. R119G. In some cases, the reference (e.g. unmodified) TACI sequence is an ECD or portion that in which the glutamine residue at position 121 is mutated, e.g. Q121P. In some cases, the reference (e.g. unmodified) TACI sequence is an ECD or portion that in which the arginine residue at position 122 is mutated, e.g. R122Q.

[0347] In some embodiments, the reference TACI sequence is a TACI ECD sequence as set forth in international PCT publication No. WO2000/067034, WO2002/094852 or WO2008/154814.

[0348] In some embodiments, the reference TACI sequence is a TACI ECD sequence that has or consists of the sequence set forth in SEQ ID NO:719.

TACI ECD (CRD1/CRD2):
SEQ ID NO: 719
SRVDQEER FPQGLWTGVA MRSCPEEQYW
DPLLGTCMSCKTICNHQSQR TCAAFCRSLS
CRKEQGKFYD HLLRDCISCA SICGQHPKQ
CAYFCENKLRS PVNLPPEL

[0349] In some embodiments, the reference TACI sequence is a TACI ECD sequence that has or consists of the sequence set forth in SEQ ID NO:718.

TACI ECD (CRD1/CRD2):
SEQ ID NO: 718
AMRSCPEEQYWDPLLGTCMSCKTICNHQSQRTCAA
FCRSLSCRKEQGKFYDHLLRDCISCASICGQHPKQ
CAYFCENKLRS

[0350] In some embodiments, the reference TACI sequence is a TACI ECD sequence that has or consists of the sequence set forth in SEQ ID NO:516 (encoded by the sequence of nucleotides set forth in SEQ ID NO:551).

TACI ECD (CRD1/CRD2):
SEQ ID NO: 516
VAMRSCPEEQYWDPLLGTCMSCKTICNHQSQRTCA
AFCRSLSCRKEQGKFYDHLLRDCISCASICGQHPK
QCAYFCENKLRS

[0351] In some embodiments, the reference TACI sequence is an extracellular domain region of TACI that consists essentially of only the CRD2 sequence and that is deleted in or lacks the entirety of the sequence of the CRD1 and substantially all of the stalk region. Although previous studies have shown that residues in the stalk region may contain a protease cleavage site, it was believed that at least the CRD1 and CRD2 was required for sufficient expression and/or binding activity of TACI for its cognate ligands. For example, international PCT publication No. WO2002/094852 demonstrated that a TACI molecule containing a CRD1 and CRD2, but in which the whole amino terminal region and a partial sequence of the stalk region was deleted, exhibited reduced protein degradation when expressed. Other studies showed that at least a portion of the N-terminal region before the CRD1 was necessary for sufficient binding activity of TACI for its cognate ligands, see e.g. international publication No. WO2008/154814, in which residues 13-118 or 13-108 of the TACI extracellular region were determined to be necessary for biological activity while minimizing degradation of TACI during expression. Surprisingly, it is found herein (e.g. Example 8) that a TACI extracellular region that consists essentially only of the CRD2 with a small portion of the stalk region exhibits substantially improved cognate binding activity compared to a longer TACI molecule containing both the CRD1 and CRD2.

[0352] In some embodiments, the BIM is a TACI polypeptide that is a portion of the TACI extracellular domain (ECD) region that contains the CRD2, with a deletion of the N-terminal region and CRD1 and deletion of one or more residues of the stalk portion of the TACI extracellular domain, e.g. relative to the sequence of amino acids set forth in SEQ ID NO:709. In some embodiments, the portion of the TACI extracellular domain that contains the CRD2 includes amino acid residues 71-104 corresponding to residues set forth in SEQ ID NO:709. In provided embodiments, the BIM of the immunomodulatory protein is a TACI polypeptide that contains deletion of N-terminal amino acid residues 1-66 corresponding to residues set forth in SEQ ID NO:709. In provided embodiments, the BIM of the immunomodulatory protein is a TACI polypeptide that contains deletion of N-terminal amino acid residues 1-67 corresponding to residues set forth in SEQ ID NO:709. In provided embodiments, the BIM of the immunomodulatory protein is a TACI polypeptide that contains deletion of N-terminal amino acid residues 1-68 corresponding to residues set forth in SEQ ID NO:709. In provided embodiments, the BIM of the immunomodulatory protein is a TACI polypeptide that contains deletion of N-terminal amino acid residues 1-69 corresponding to residues set forth in SEQ ID NO:709. In provided embodiments, the BIM of the immunomodulatory protein is a TACI polypeptide that contains deletion of N-terminal amino acid residues 1-70 corresponding to residues set forth in SEQ ID NO:709. In some of any such embodiments, the BIM of the immunomodulatory protein is a TACI polypeptide that lacks one or more contiguous C-terminal amino acid residues beginning at residue 105 and up to or including amino acid residue 166 corresponding to residues of the ECD sequence set forth in SEQ ID NO:709. In some embodiments, 1, 2, 3, 4, 5, 6, 7, 8, 9, 10, 11, 12, 13, 14, 15, 16, 17, 18, 19, 20, 21, 22, 23, 24, 25, 26, 27, 28, 29, 30, 31, 32, 33, 34, 35, 36, 37, 38, 39, 40, 41, 42, 43, 44, 45, 46, 47, 48, 49, 50, 51, 52, 53, 54, 55, 56, 57, 58, 59, 60, 61 or 62 of the ECD sequence is deleted.

[0353] In some embodiments, the BIM of an immunomodulatory protein provided herein is a TACI polypeptide with a sequence that contains an ECD portion having a contiguous sequence of amino acids of a TACI ECD that includes the CRD2 (e.g. residues 71-104 with reference to SEQ ID NO:709), but with a deletion of the N-terminal region and CRD1 and deletion of one or more residues of the stalk portion of the TACI extracellular domain, e.g. relative to the sequence of amino acids set forth in SEQ ID NO:709. For example, the TACI ECD portion can consist of the following with reference to amino acid residues set forth in SEQ ID NO:709: amino acid residues 67 to 118, amino acid residues 67 to 117, amino acid residues 67 to 116, amino acid residues 67 to 115, amino acid residues 67 to 114, amino acid residues 67 to 113, amino acid residues 67 to 112, amino acid residues 67 to 111, amino acid residues 67 to 110, amino acid residues 67 to 109, amino acid residues 67 to 108, amino acid residues 67 to 107, amino acid residues 67 to 106, amino acid residues 67 to 105, or amino acid residues 67 to 104. In some examples, the TACI ECD portion can consist of the following with reference to residues set forth in SEQ ID NO: 709: amino acid residues 68 to 118, amino acid residues 68 to 117, amino acid residues 68 to 116, amino acid residues 68 to 115, amino acid residues 68 to 114, amino acid residues 68 to 113, amino acid residues 68 to 112, amino acid residues 68 to 111, amino acid residues 68 to 110, amino acid residues 68 to 109, amino acid residues 68 to 108, amino acid residues 68 to 107, amino acid residues 68 to 106, amino acid residues 68 to 105, or amino acid residues 68 to 104. In some examples, the TACI ECD portion can consist of the following with reference to residues set forth in SEQ ID NO: 709: amino acid residues 69 to 118, amino acid residues 69 to 117, amino acid residues 69 to 116, amino acid residues 69 to 115, amino acid residues 69 to 114, amino acid residues 69 to 113, amino acid residues 69 to 112, amino acid residues 69 to 111, amino acid residues 69 to 110, amino acid residues 69 to 109, amino acid residues 69 to 108, amino acid residues 69 to 107, amino acid residues 69 to 106, amino acid residues 69 to 105, or amino acid residues 69 to 104. In some examples, the TACI ECD portion can consist of the following with reference to residues set forth in SEQ ID NO: 709: amino acid residues 70 to 118, amino acid residues 70 to 117, amino acid residues 70 to 116, amino acid residues 70 to 115, amino acid residues 70 to 114, amino acid residues 70 to 113, amino acid residues 70 to 112, amino acid residues 70 to 111, amino acid residues 70 to 110, amino acid residues 70 to 109, amino acid residues 70 to 108, amino acid residues 70 to 107, amino acid residues 70 to 106, amino acid residues 70 to 105, or amino acid residues 70 to 104. In some examples, the TACI ECD portion can consist of the following with reference to residues set forth in SEQ ID NO: 709: amino acid residues 71 to 118, amino acid residues 71 to 117, amino acid residues 71 to 116, amino acid residues 71 to 115, amino acid residues 71 to 114, amino acid residues 71 to 113, amino acid residues 71 to 112, amino acid residues 71 to 111, amino acid residues 71 to 110, amino acid residues 71 to 109, amino acid residues 71 to 108, amino acid residues 71 to 107, amino acid residues 71 to 106, amino acid residues 71 to 105, or amino acid residues 71 to 104. Any of the above TACI ECD sequences also can be a TACI reference sequence in accord with a TIM that is a variant TACI in the immunomodulatory proteins provided herein, in which such immunomodulatory proteins contain a variant TACI polypeptide that is modified by one or more amino acid modification (e.g. substitution) as described herein compared to such TACI reference sequence.

[0354] In particular, among a BIM in a provided immunomodulatory protein is a TACI ECD sequence that has or consists of the sequence set forth in SEQ ID NO:528 (encoded by the sequence of nucleotides set forth in SEQ ID NO:563. In some embodiments, the reference TACI sequence has or consists of the sequence set forth in SEQ ID NO:528, in which a provided variant TACI polypeptide is modified by one or more amino acid modification (e.g. substitution) as described herein compared to such reference TACI sequence.

TACI ECD sequence (CRD2):
SEQ ID NO: 528
SLSCRKEQGKFYDHLLRDCISCASICGQHPKQCAY
FCENKLRS

[0355] Among BIMs in a provided immunomodulatory protein are variant TACI polypeptides. In some of any of the provided embodiments, the variant TACI sequence has the sequence of the reference (e.g. unmodified) TACI sequence, such as any described above, but additionally contains one more amino acid modifications, such as one or more amino acid substitutions. In particular, a BIM provided herein may be a variant TACI polypeptide containing at least one affinity-modified TD domain (e.g., CRD1 and/or CRD2) or a specific binding fragment thereof that contains one or more amino acid substitutions in a TD domain of a reference (e.g., unmodified or wild-type) TACI polypeptide, such that the variant TACI polypeptide exhibits altered (e.g. increased) binding activity or affinity for one or both of APRIL or BAFF compared to the reference (e.g., unmodified or wild-type) TACI polypeptide. In some embodiments, a BIM is a variant TACI polypeptide that has a binding affinity for APRIL and/or BAFF that differs from that of a reference (e.g., unmodified or wild-type) TACI polypeptide control sequence as determined by, for example, solid-phase ELISA immunoassays, flow cytometry or Biacore assays. Binding affinities for each of the cognate binding partners are independent; that is, in some embodiments, a variant TACI polypeptide has an increased binding affinity for one or both APRIL and BAFF, and a decreased or unchanged binding affinity for the other of APRIL or BAFF, relative to a reference (e.g., unmodified or wild-type) TACI polypeptide.

[0356] In some embodiments, the BIM is a variant TACI polypeptide that has an increased binding affinity for BAFF, relative to the reference (unmodified or wild-type) TACI polypeptide. In some embodiments, the BIM is a variant TACI polypeptide that has an increased binding affinity for APRIL relative to the reference (unmodified or wild-type) TACI polypeptide. In some embodiments, the BIM is a variant TACI polypeptide has an increased binding affinity for APRIL and BAFF relative to the reference (unmodified or wild-type) TACI polypeptide. The cognate ligands BAFF and/or APRIL can be a mammalian protein, such as a human protein or a murine protein. In some embodiments, a BIM that is a variant TACI polypeptide with increased or greater binding affinity to APRIL and/or BAFF will have an increase in binding affinity relative to the reference (e.g., unmodified or wild-type) TACI polypeptide control of at least about 5%, such as at least about 10%, 15%, 20%, 25%, 35%, or 50%. In some embodiments, the increase in binding affinity relative to the reference (e.g., unmodified or wild-type) TACI polypeptide is more than 1.2-fold, 1.5-fold, 2-fold, 3-fold, 4-fold, 5-fold, 6-fold, 7-fold, 8-fold, 9-fold, 10-fold, 20-fold, 30-fold 40-fold or 50-fold. In any of the examples, the reference (e.g., unmodified or wild-type) TACI polypeptide has the same sequence as the variant TACI polypeptide except that it does not contain the one or more amino acid modifications (e.g., substitutions).

[0357] In some embodiments, the equilibrium dissociation constant (K_{d}) of any of the foregoing embodiments to BAFF can be less than 1×10⁻⁵ M, 1×10⁻⁶ M, 1×10⁻⁷ M, 1×10⁻⁸ M, 1×10⁻⁹ M, 1×10⁻¹⁰ M or 1×10⁻¹¹M, or 1×10⁻¹² M. In some embodiments, the K_{d} of any of the foregoing embodiments to BAFF is less than at or about 1×10⁻⁹ M, 1×10⁻¹⁰ M or 1×10⁻¹¹ M, or 1×10⁻¹² M. In some embodiments, the K_{d} of any of the foregoing embodiments to BAFF is between 1×10⁻⁹ M and at or about 1×10⁻¹² M. In some embodiments, the K_{d} of any of the foregoing embodiments to BAFF is at or about 1×10⁻⁹ M, at or about 2×10⁻⁹ M, at or about 4×10⁻⁹ M, at or about 6×10⁻⁹ M, at or about 8×10⁻⁹ M, at or about 1×10⁻¹⁰ M, at or about 2×10⁻¹⁰ M, at or about 4×10⁻¹⁰ M, at or about 6×10⁻¹⁰ M, at or about 8×10⁻¹⁰ M, at or about 1×10⁻¹¹ M, at or about 2×10⁻¹¹ M, at or about 4×10⁻¹⁰ M, at or about 6×10⁻¹¹ M, at or about 8×10⁻¹¹ M, or at or about 1×10⁻¹² M, or any value between any of the foregoing. In some embodiments, a BIM in a provided embodiment is a variant TACI polypeptide as described above and the K_{d} to BAFF is decreased (higher binding affinity) by greater than or greater than about 1.5-fold, such as greater than or about 2-fold, 3-fold, 4-fold, 5-fold, 6-fold, 7-fold, 8-fold, 9-fold, 10-fold or more.

[0358] In some embodiments, the equilibrium dissociation constant (K_{d}) of any of the foregoing embodiments to APRIL can be less than 1×10⁻⁵ M, 1×10⁻⁶ M, 1×10⁻⁷ M, 1×10⁻⁸ M, 1×10⁻⁹ M, 1×10⁻¹⁰ M or 1×10⁻¹¹M, or 1×10⁻¹² M. In some embodiments, the K_{d} of any of the foregoing embodiments to APRIL is less than at or about 1×10⁻⁹ M, 1×10⁻¹⁰ M or 1×10⁻¹¹M, or 1×10⁻¹² M. In some embodiments, the K_{d} of any of the foregoing embodiments to APRIL is between 1×10⁻⁹ M and at or about 1×10⁻¹² M. In some embodiments, the K_{d} of any of the foregoing embodiments to APRIL is at or about 1×10⁻⁹ M, at or about 2×10⁻⁹ M, at or about 4×10⁻⁹ M, at or about 6×10⁻⁹ M, at or about 8×10⁻⁹ M, at or about 1×10⁻¹⁰ M, at or about 2×10⁻¹⁰ M, at or about 4×10⁻¹⁰ M, at or about 6×10⁻¹⁰ M, at or about 8×10⁻¹⁰ M, at or about 1×10⁻¹¹ M, at or about 2×10⁻¹¹ M, at or about 4×10⁻¹¹ M, at or about 6×10⁻¹¹ M, at or about 8×10⁻¹¹ M, or at or about 1×10⁻¹² M, or any value between any of the foregoing. In some embodiments, a BIM of a provided embodiment is a variant TACI polypeptide as described above and the K_{d} to APRIL is decreased (higher binding affinity) by greater than or greater than about 1.5-fold, such as greater than or about 2-fold, 3-fold, 4-fold, 5-fold, 6-fold, 7-fold, 8-fold, 9-fold, 10-fold or more.

[0359] The reference (e.g., unmodified or wild-type) TACI sequence does not necessarily have to be used as a starting composition to generate a BIM that is a variant TACI polypeptide described herein. Therefore, use of the term “modification”, such as “substitution” does not imply that the present embodiments are limited to a particular method of making variant TACI polypeptides or immunomodulatory proteins containing the same. Variant TACI polypeptides can be made, for example, by de novo peptide synthesis and thus does not necessarily require a modification, such as a “substitution”, in the sense of altering a codon to encode for the modification, e.g. substitution. This principle also extends to the terms “addition” and “deletion” of an amino acid residue which likewise do not imply a particular method of making. The means by which the variant TACI polypeptides are designed or created is not limited to any particular method. In some embodiments, however, a reference (e.g., unmodified or wild-type) TACI encoding nucleic acid is mutagenized from reference (e.g., unmodified or wild-type) TACI genetic material and screened for desired specific binding affinity or other functional activity. In some embodiments, a variant TACI polypeptide is synthesized de novo utilizing protein or nucleic acid sequences available at any number of publicly available databases and then subsequently screened. The National Center for Biotechnology Information provides such information and its website is publicly accessible via the internet as is the UniProtKB database as discussed previously.

[0360] Unless stated otherwise, as indicated throughout the present disclosure, reference to an amino acid modification (s) of a BIM that is a variant TACI polypeptide are designated by amino acid position number corresponding to the numbering of positions of the reference ECD sequence set forth in SEQ ID NO:709. It is within the level of a skilled artisan to identify the corresponding position of a modification, e.g. amino acid substitution, in an TACI polypeptide, including portion thereof containing TD (e.g. CRD1 and/or CRD2) thereof, such as by alignment of a reference sequence (e.g. SEQ ID NO:516 or 528) with SEQ ID NO:709. An alignment identifying corresponding residues is exemplified in FIG. 17A. In the listing of modifications throughout this disclosure, the amino acid position is indicated in the middle, with the corresponding reference (e.g. unmodified or wild-type) amino acid listed before the number and the identified variant amino acid substitution listed after the number. If the modification is a deletion of the position a “del” is indicated and if the modification is an insertion at the position an “ins” is indicated. In some cases, an insertion is listed with the amino acid position indicated in the middle, with the corresponding reference amino acid listed before and after the number and the identified variant amino acid insertion listed after the unmodified (e.g. wild-type) amino acid.

[0361] In some embodiments, a BIM is a variant TACI polypeptide that has one or more amino acid modification, e.g. substitution in a reference (e.g., unmodified or wild-type) TACI sequence, such as any as described. The one or more amino acid modification, e.g. substitution, can be in the ectodomain (extracellular domain) of the reference (e.g., unmodified or wild-type) TACI sequence. In some embodiments, the one or more amino acid modification, e.g. substitution is in the CRD1 domain or specific binding fragment thereof. In some embodiments, the one or more amino acid modification, e.g. substitution is in the CRD2 domain or specific binding fragment thereof. In some embodiments of the variant TACI polypeptide, some of the one or more amino acid modification, e.g. substitution is in the CRD1 domain or a specific binding fragment thereof, and some of the one or more amino acid modification, e.g. substitution are in the CRD2 domain or a specific binding fragment thereof.

[0362] In some embodiments, a BIM that is a variant TACI polypeptide has up to 1, 2, 3, 4, 5, 6, 7, 8, 9, 10, 11, 12, 13, 14, 15, 16, 17, 18, 19, or 20 amino acid modification(s), e.g. substitution. The modification, e.g. substitution can be in the CRD1 domain or the CRD2 domain. In some embodiments, a BIM that is a variant TACI polypeptide has up to 1, 2, 3, 4, 5, 6, 7, 8, 9, 10, 11, 12, 13, 14, 15, 16, 17, 18, 19, or 20 amino acid substitutions in the CRD1 domain or specific binding fragment thereof. In some embodiments, a BIM that is a variant TACI polypeptide has up to 1, 2, 3, 4, 5, 6, 7, 8, 9, 10, 11, 12, 13, 14, 15, 16, 17, 18, 19, or 20 amino acid substitutions in the CRD2 domain or specific binding fragment thereof. In some embodiments, the variant TACI polypeptide containing the one or more amino acid modifications (e.g. amino acid substitutions) as described has at least about 85%, 86%, 86%, 88%, 89%, 90%, 91%, 92%, 93%, 94%, 95%, 96%, 97%, 98%, or 99% sequence identity with the reference (e.g., unmodified or wild-type) TACI polypeptide or specific binding fragment thereof, such as with the amino acid sequence of SEQ ID NO: 516, 528 or 709. In some embodiments, the variant TACI polypeptide containing the one or more amino acid modifications (e.g. amino acid substitutions) as described has at least about 85%, 86%, 86%, 88%, 89%, 90%, 91%, 92%, 93%, 94%, 95%, 96%, 97%, 98%, or 99% sequence identity with the amino acid sequence of SEQ ID NO: 709. In some embodiments, the variant TACI polypeptide containing the one or more amino acid modifications (e.g. amino acid substitutions) as described has at least about 85%, 86%, 86%, 88%, 89%, 90%, 91%, 92%, 93%, 94%, 95%, 96%, 97%, 98%, or 99% sequence identity with the amino acid sequence of SEQ ID NO: 516. In some embodiments, the variant TACI polypeptide containing the one or more amino acid modifications (e.g. amino acid substitutions) as described has at least about 85%, 86%, 86%, 88%, 89%, 90%, 91%, 92%, 93%, 94%, 95%, 96%, 97%, 98%, or 99% sequence identity with the amino acid sequence of SEQ ID NO: 528.

[0363] In some embodiments, a BIM that is a variant TACI polypeptide has one or more amino acid modification, e.g. substitution in a reference TACI polypeptide or specific binding fragment there of corresponding to position(s) 40, 59, 60, 61, 74, 75, 76, 77, 78, 79, 82, 83, 84, 85, 86, 87, 88, 92, 95, 97, 98, 99, 101, 102 and 103 with reference to numbering of SEQ ID NO:709. In some embodiments, a BIM that is a variant TACI polypeptide has one or more amino acid modification, e.g. substitution selected from W40R, Q59R, R60G, T61P, E74V, Q75E, Q75R, G76S, K77E, F78Y, Y79F, L82H, L82P, L83S, R84G, R84L, R84Q, D85E, D85V, C86Y, I87L, I87M, S88N, I92V, Q95R, P97S, K98T, Q99E, A101D, Y102D, F103S, F103V, F103Y, or a conservative amino acid substitution thereof. In some embodiments, the reference TACI polypeptide includes the CRD1 domain or CRD2 domain, for example the reference TACI polypeptide is set forth in SEQ ID NO: 516 or SEQ ID NO:709.

[0364] In some embodiments, the amino acid substitutions are in the CRD2 domain only. In some embodiments, a BIM that is a variant TACI polypeptide has one or more amino acid modification, e.g. substitution in a reference TACI polypeptide or specific binding fragment there of corresponding to position(s) 74, 75, 76, 77, 78, 79, 82, 83, 84, 85, 86, 87, 88, 92, 95, 97, 98, 99, 101, 102 and 103 with reference to numbering of SEQ ID NO:709. In some embodiments, a BIM that is a variant TACI polypeptide has one or more amino acid modification, e.g. substitution selected from E74V, Q75E, Q75R, G76S, K77E, F78Y, Y79F, L82H, L82P, L83S, R84G, R84L, R84Q, D85E, D85V, C86Y, I87L, I87M, S88N, I92V, Q95R, P97S, K98T, Q99E, A11D, Y102D, F103S, F103V, F103Y, or a conservative amino acid substitution thereof. In some embodiments, among the CRD domains, the reference TACI polypeptide includes only the CRD2 domain but lacks the CRD1 domain, for example the reference TACI polypeptide is set forth in SEQ ID NO: 528. Accordingly, in some embodiments, a BIM that is a variant TACI polypeptide includes a portion of the ECD sequence of a TACI polypeptide that includes the CRD2 domain but lacks the CRD1 domain.

[0365] A conservative amino acid modification, e.g. substitution is any amino acid that falls in the same class of amino acids as the substituted amino acids, other than the reference (e.g., unmodified) or wild-type amino acid. The classes of amino acids are aliphatic (glycine, alanine, valine, leucine, and isoleucine), hydroxyl or sulfur-containing (serine, cysteine, threonine, and methionine), cyclic (proline), aromatic (phenylalanine, tyrosine, tryptophan), basic (histidine, lysine, and arginine), and acidic/amide (aspartate, glutamate, asparagine, and glutamine).

[0366] In some embodiments, a BIM that is a variant TACI polypeptide includes at least one amino acid substitution at position 75 with reference to numbering of SEQ ID NO:709. In some embodiments, the amino acid substitution at position 75 confers increased binding to BAFF or APRIL compared to the reference (e.g. wildtype or unmodified) TACI polypeptide not containing the amino acid substitution. In some embodiments, the substituted amino acid is an acidic amino acid or amide, such as to a different acidic amino acid or amide compared to the reference (e.g. wildtype or unmodified) TACI polypeptide. In some embodiments, the substituted amino acid at position 75 is a glutamic acid (Glu, E). In some embodiments, the substituted amino acid at position 75 is an asparatic acid (Asp, D). In some embodiments, the substituted amino acid at position 75 is an asparagine (Asn, N). In some embodiments, the substituted amino acid at position 75 is a glutamine (Gln, Q).

[0367] In some embodiments, a BIM that is a variant TACI polypeptide includes at least one amino acid substitution at position 77 with reference to numbering of SEQ ID NO:709. In some embodiments, the amino acid substitution at position 77 confers increased binding to BAFF or APRIL compared to the reference (e.g. wildtype or unmodified) TACI polypeptide not containing the amino acid substitution. In some embodiments, the substituted amino acid at position 77 is an acidic amino acid or amide. In some embodiments, the substituted amino acid at position 77 is a glutamic acid (Glu, E). In some embodiments, the substituted amino acid at position 77 is an asparatic acid (Asp, D). In some embodiments, the substituted amino acid at position 77 is an asparagine (Asn, N). In some embodiments, the substituted amino acid at position 77 is a glutamine (Gln, Q).

[0368] In some embodiments, a BIM that is a variant TACI polypeptide includes at least one amino acid substitution at position 78 with reference to numbering of SEQ ID NO:709. In some embodiments, the amino acid substitution at position 78 confers increased binding to BAFF or APRIL compared to the reference (e.g. wildtype or unmodified) TACI polypeptide not containing the amino acid substitution. In some embodiments, the substituted amino acid at position 78 is an aromatic amino acid, such as to a different aromatic amino acid compared to the reference (e.g. wildtype or unmodified) TACI polypeptide. In some embodiments, the substituted amino acid at position 78 is a phenyalanine (Phe, F). In some embodiments, the substituted amino acid at position 78 is a tyrosine (Tyr, Y). In some embodiments, the substituted amino acid at position 78 is a tryptophan (Trp, W).

[0369] In some embodiments, a BIM that is a variant TACI polypeptide includes at least one amino acid substitution at position 84 with reference to numbering of SEQ ID NO:709. In some embodiments, the amino acid substitution at position 84 confers increased binding to BAFF or APRIL compared to the reference (e.g. wildtype or unmodified) TACI polypeptide not containing the amino acid substitution. In some embodiments, the substituted amino acid at position 84 is an acidic amino acid or amide. In some embodiments, the substituted amino acid at position 84 is a glutamic acid (Glu, E). In some embodiments, the substituted amino acid at position 84 is an asparatic acid (Asp, D). In some embodiments, the substituted amino acid at position 84 is an asparagine (Asn, N). In some embodiments, the substituted amino acid at position 84 is a glutamine (Gln, Q).

[0370] In some embodiments, a BIM that is a variant TACI polypeptide includes at least one amino acid substitution at position 102 with reference to numbering of SEQ ID NO:709. In some embodiments, the amino acid substitution at position 102 confers increased binding to BAFF or APRIL compared to the reference (e.g. wildtype or unmodified) TACI polypeptide not containing the amino acid substitution. In some embodiments, the substituted amino acid at position 102 is an acidic amino acid or amide. In some embodiments, the substituted amino acid at position 102 is a glutamic acid (Glu, E). In some embodiments, the substituted amino acid at position 102 is an asparatic acid (Asp, D). In some embodiments, the substituted amino acid at position 102 is an asparagine (Asn, N). In some embodiments, the substituted amino acid at position 102 is a glutamine (Gln, Q).

[0371] In some embodiments, a BIM that is a variant TACI polypeptide includes at least one amino acid substitution E74V. In some embodiments, a BIM that is a variant TACI polypeptide includes at least one amino acid substitution Q75E. In some embodiments, a BIM that is a variant TACI polypeptide includes at least one amino acid substitution K77E. In some embodiments, a BIM that is a variant TACI polypeptide includes at least one amino acid substitution F78Y. In some embodiments, a BIM that is a variant TACI polypeptide includes at least one amino acid substitution Y79F. In some embodiments, a BIM that is a variant TACI polypeptide includes at least one amino acid substitution L82H. In some embodiments, a BIM that is a variant TACI polypeptide includes at least one amino acid substitution L82P. In some embodiments, a BIM that is a variant TACI polypeptide includes at least one amino acid substitution R84G. In some embodiments, a BIM that is a variant TACI polypeptide includes at least one amino acid substitution R84L. In some embodiments, a BIM that is a variant TACI polypeptide includes at least one amino acid substitution R84Q. In some embodiments, a BIM that is a variant TACI polypeptide includes at least one amino acid substitution D85V. In some embodiments, a BIM that is a variant TACI polypeptide includes at least one amino acid substitution C86Y. In some embodiments, a BIM that is a variant TACI polypeptide includes at least one amino acid substitution Y102D. In some embodiments, a BIM that is a variant TACI polypeptide contains two or more amino acid substitutions of any two or more of the foregoing. In some embodiments, a BIM that is a variant TACI polypeptide includes one or more amino acid substitution that is a conservative amino acid substitution of any of the foregoing. In provided embodiments, a BIM that is a variant TACI polypeptide includes the at least one amino acid substitution in any reference TACI polypeptide sequence as described. In some embodiments, the at least one amino acid substitution is in the reference TACI sequence set forth in SEQ ID NO: 516. In some embodiments, the at least one amino acid substitution is in the reference TACI sequence set forth in SEQ ID NO: 528. In some embodiments, the at least one amino acid substitution is in the reference TACI sequence set forth in SEQ ID NO: 718. In some embodiments, the at least one amino acid substitution is in the reference TACI sequence set forth in SEQ ID NO: 719.

[0372] In some embodiments, a BIM that is a variant TACI polypeptide includes the amino acid substitution E74V. In some embodiments, a BIM that is a variant TACI polypeptide includes the amino acid substitution Q75E. In some embodiments, a BIM that is a variant TACI polypeptide includes the amino acid substitution K77E. In some embodiments, a BIM that is a variant TACI polypeptide includes the amino acid substitution F78Y. In some embodiments, a BIM that is a variant TACI polypeptide includes the amino acid substitution Y79F. In some embodiments, a BIM that is a variant TACI polypeptide includes the amino acid substitution L82H. In some embodiments, a BIM that is a variant TACI polypeptide includes the amino acid substitution L82P. In some embodiments, a BIM that is a variant TACI polypeptide includes the amino acid substitution R84G. In some embodiments, a BIM that is a variant TACI polypeptide includes the amino acid substitution R84L. In some embodiments, a BIM that is a variant TACI polypeptide includes the amino acid substitution R84Q. In some embodiments, a BIM that is a variant TACI polypeptide includes the amino acid substitution D85V. In some embodiments, a BIM that is a variant TACI polypeptide includes the amino acid substitution C86Y. In some embodiments, a BIM that is a variant TACI polypeptide includes the amino acid substitution Y102D. In some embodiments, a BIM that is a variant TACI polypeptide contains two or more amino acid substitutions of any two or more of the foregoing. In some embodiments, a BIM that is a variant TACI polypeptide includes one or more of amino acid substitution that is a conservative amino acid substitution of any of the foregoing. In provided embodiments, a BIM that is a variant TACI polypeptide includes the amino acid substitution in any reference TACI polypeptide sequence as described. In some embodiments, the amino acid substitution is in the reference TACI sequence set forth in SEQ ID NO: 516. In some embodiments, the amino acid substitution is in the reference TACI sequence set forth in SEQ ID NO: 528. In some embodiments, the amino acid substitution is in the reference TACI sequence set forth in SEQ ID NO: 718. In some embodiments, the amino acid substitution is in the reference TACI sequence set forth in SEQ ID NO: 719.In some embodiments, the amino acid substitutions are D85E/K98T. In some embodiments, the amino acid substitutions are I87L/K98T. In some embodiments, the amino acid substitutions are R60G/Q75E/L82P. In some embodiments, the amino acid substitutions are R60G/C86Y. In some embodiments, the amino acid substitutions are W40R/L82P/F103Y. In some embodiments, the amino acid substitutions are W40R/Q59R/T61P/K98T. In some embodiments, the amino acid substitutions are L82P/I87L. In some embodiments, the amino acid substitutions are G76S/P97S. In some embodiments, the amino acid substitutions are K77E/R84L/F103Y. In some embodiments, the amino acid substitutions are Y79F/Q99E. In some embodiments, the amino acid substitutions are L83S/F103S. In some embodiments, the amino acid substitutions are K77E/R84Q. In some embodiments, the amino acid substitutions are K77E/A101D. In some embodiments, the amino acid substitutions are K77E/F78Y/Y102D. In some embodiments, the amino acid substitutions are Q75E/R84Q. In some embodiments, the amino acid substitutions are Q75R/R84G/I92V. In some embodiments, the amino acid substitutions are K77E/A101D/Y102D. In some embodiments, the amino acid substitutions are R84Q/S88N/A101D. In some embodiments, the amino acid substitutions are R84Q/F103V. In some embodiments, the amino acid substitutions are K77E/Q95R/A101D. In some embodiments, the amino acid substitutions are I87M/A101D. In provided embodiments, a BIM that is a variant TACI polypeptide includes the amino acid substitutions in any reference TACI polypeptide sequence as described. In some embodiments, the amino acid substitution is in the reference TACI sequence set forth in SEQ ID NO: 516. In some embodiments, the amino acid substitution is in the reference TACI sequence set forth in SEQ ID NO: 528. In some embodiments, the amino acid substitution is in the reference TACI sequence set forth in SEQ ID NO: 718. In some embodiments, the amino acid substitution is in the reference TACI sequence set forth in SEQ ID NO: 719.

[0373] In some embodiments, a BIM that is a variant TACI polypeptide includes the amino acid substitutions K77E and F78Y (K77E/F78Y). In provided embodiments, a BIM that is a variant TACI polypeptide includes the amino acid substitutions in any reference TACI polypeptide sequence as described. In some embodiments, the amino acid substitution is in the reference TACI sequence set forth in SEQ ID NO: 516. In some embodiments, the amino acid substitution is in the reference TACI sequence set forth in SEQ ID NO: 528. In some embodiments, the amino acid substitution is in the reference TACI sequence set forth in SEQ ID NO: 718. In some embodiments, the amino acid substitution is in the reference TACI sequence set forth in SEQ ID NO: 719.

[0374] In some embodiments, a BIM that is a variant TACI polypeptide includes the amino acid substitutions K77E and Y102D (K77E/Y102D). In provided embodiments, a BIM that is a variant TACI polypeptide includes the amino acid substitutions in any reference TACI polypeptide sequence as described. In some embodiments, the amino acid substitution is in the reference TACI sequence set forth in SEQ ID NO: 516. In some embodiments, the amino acid substitution is in the reference TACI sequence set forth in SEQ ID NO: 528. In some embodiments, the amino acid substitution is in the reference TACI sequence set forth in SEQ ID NO: 718. In some embodiments, the amino acid substitution is in the reference TACI sequence set forth in SEQ ID NO: 719.

[0375] In some embodiments, a BIM that is a variant TACI polypeptide contains the amino acid substitutions F78Y and Y102D (F78Y/Y012D). In provided embodiments, a BIM that is a variant TACI polypeptide includes the amino acid substitutions in any reference TACI polypeptide sequence as described. In some embodiments, the amino acid substitution is in the reference TACI sequence set forth in SEQ ID NO: 516. In some embodiments, the amino acid substitution is in the reference TACI sequence set forth in SEQ ID NO: 528. In some embodiments, the amino acid substitution is in the reference TACI sequence set forth in SEQ ID NO: 718. In some embodiments, the amino acid substitution is in the reference TACI sequence set forth in SEQ ID NO: 719.

[0376] In some embodiments a BIM that is a variant TACI polypeptide contains the amino acid substations K77E, F78Y and Y102D (K77E/F78Y/Y102D). In provided embodiments, a BIM that is a variant TACI polypeptide includes the amino acid substitutions in any reference TACI polypeptide sequence as described. In some embodiments, the amino acid substitution is in the reference TACI sequence set forth in SEQ ID NO: 516. In some embodiments, the amino acid substitution is in the reference TACI sequence set forth in SEQ ID NO: 528. In some embodiments, the amino acid substitution is in the reference TACI sequence set forth in SEQ ID NO: 718. In some embodiments, the amino acid substitution is in the reference TACI sequence set forth in SEQ ID NO: 719.

[0377] In some embodiments, a BIM that is a variant TACI polypeptide contains the amino acid substitutions Q75E/R84Q. In provided embodiments, a BIM that is a variant TACI polypeptide includes the amino acid substitutions in any reference TACI polypeptide sequence as described. In some embodiments, the amino acid substitution is in the reference TACI sequence set forth in SEQ ID NO: 516. In some embodiments, the amino acid substitution is in the reference TACI sequence set forth in SEQ ID NO: 528. In some embodiments, the amino acid substitution is in the reference TACI sequence set forth in SEQ ID NO: 718. In some embodiments, the amino acid substitution is in the reference TACI sequence set forth in SEQ ID NO: 719.

[0378] In some embodiments, a BIM that is a variant TACI polypeptide comprises any of the mutations listed in Table 2. Table 2 also provides exemplary sequences by reference to SEQ ID NO of the reference (e.g., unmodified) TACI polypeptide, and exemplary variant TACI polypeptides. As indicated, the exact locus or residues corresponding to a given domain can vary, such as depending on the methods used to identify or classify the domain. Also, in some cases, adjacent N- and/or C-terminal amino acids of a given domain (e.g. CRD) also can be included in a sequence of a BIM that is a variant TACI polypeptide, such as to ensure proper folding of the domain when expressed. Thus, it is understood that the exemplification of the SEQ ID NOSs in Table 2 is not to be construed as limiting. For example, the particular domain, such as the ECD domain or a portion thereof containing the CRD1/CRD2 or CRD2 only, of a variant TACI polypeptide can be several amino acids longer or shorter, such as 1-10, e.g., 1, 2, 3, 4, 5, 6 or 7 amino acids longer or shorter, than the sequence of amino acids set forth in the respective SEQ ID NO.

[0379] In some embodiments, a BIM that is a variant TACI polypeptide comprises any of the mutations (amino acid substitutions) listed in Table 2. In some examples, the mutations (amino acid substitutions) are made in a reference TACI containing the sequence of amino acids set forth in SEQ ID NO: 709. In some examples, the mutations (amino acid substitutions) are made a reference TACI that contains the CRD1 and CRD2 domain of TACI, for example as set forth in SEQ ID NO: 516. In some examples, the mutations (amino acid substitutions) are made in a reference TACI that is further truncated by deletion of N-terminal and C-terminal amino acid residues to retain the CRD2, for example as set forth in SEQ ID NO: 528.

[0380] The use of the term “modification”, such as “substitution” or “mutation,” does not imply that the present embodiments are limited to a particular method of making the immunomodulatory proteins. A BIM that is a variant TACI polypeptide can be made, for example, by de novo peptide synthesis and thus does not necessarily require a modification, such as a “substitution” in the sense of altering a codon to encode for the modification, e.g. substitution. This principle also extends to the terms “addition” and “deletion” of an amino acid residue which likewise do not imply a particular method of making. The means by which the vTDs are designed or created is not limited to any particular method. In some embodiments, however, a wild-type or unmodified TD encoding nucleic acid is mutagenized from wild-type or unmodified TD genetic material and screened for desired specific binding activity, e.g. binding affinity, and/or alteration of NF-κB modulation or other functional activity. In some embodiments, a vTD is synthesized de novo utilizing protein or nucleic acid sequences available at any number of publicly available databases and then subsequently screened. The National Center for Biotechnology Information provides such information and its website is publicly accessible via the internet as is the UniProtKB database.

[0381] In some embodiments, a BIM that is a variant TACI polypeptide comprises an extracellular domain (ECD) sequences containing a CRD1 and CRD2, such as a variant TACI polypeptide set forth in any one of SEQ ID NOS: 517-527, 536, 537, 682-701. In some embodiments, a BIM that is a variant TACI polypeptide comprises a polypeptide sequence that exhibits at least 90% identity, at least 91% identity, at least 92% identity, at least 93% identity, at least 94% identity, at least 95% identity, such as at least 96% identity, 97% identity, 98% identity, or 99% identity to any one of SEQ ID NOS: 517-527, 536, 537, 682-701, and retains the amino acid modification(s), e.g. substitution(s) therein not present in the reference (e.g., unmodified or wild-type) TAC. In some embodiments, a BIM that is a variant TACI polypeptide comprises a specific binding fragment of any one of SEQ ID NOS: 517-527, 536, 537, 682-701, in which the specific binding fragment binds BAFF, APRIL or a BAFF/APRIL heterotrimer, and contains a contiguous sequence therein that contains the amino acid modification(s), e.g. substitution (s) therein not present in the reference (e.g., unmodified or wild-type) TACI.

[0382] In some embodiments, a BIM that is a variant TACI polypeptide consists or consists essentially of a variant TACI extracellular domain (ECD) sequences set forth in any one of SEQ ID NOS: 517-527, 536, 537, 682-701. In some embodiments, a BIM that is a variant TACI polypeptide consists or consists essentially of a polypeptide sequence that exhibits at least 90% identity, at least 91% identity, at least 92% identity, at least 93% identity, at least 94% identity, at least 95% identity, such as at least 96% identity, 97% identity, 98% identity, or 99% identity to any one of SEQ ID NOS: 517-527, 536, 537, 682-701, and retains the amino acid modification(s), e.g. substitution(s) therein not present in the reference (e.g., unmodified or wild-type) TACI. In some embodiments, a BIM that is a variant TACI polypeptide consists or consists essentially of a specific binding fragment of any one of SEQ ID NOS: 517-527, 536, 537, 682-701, in which the specific binding fragment binds BAFF, APRIL or an APRIL/BAFF heterotrimer and contains a contiguous sequence therein that contains the amino acid modification(s), e.g. substitution (s) therein not present in the reference (e.g., unmodified or wild-type) TACI.

[0383] In some embodiments, a BIM that is a variant TACI polypeptide comprises an extracellular domain (ECD) sequences containing a CRD2 but lacking the CRD1 of a reference TACI polypeptide, such as a variant TACI polypeptide set forth in any one of SEQ ID NOS: 529-535, 538-550, 673-681. In some embodiments, a BIM that is a variant TACI polypeptide comprises a polypeptide sequence that exhibits at least 90% identity, at least 91% identity, at least 92% identity, at least 93% identity, at least 94% identity, at least 95% identity, such as at least 96% identity, 97% identity, 98% identity, or 99% identity to any one of SEQ ID NOS: 529-535, 538-550, 673-681, and retains the amino acid modification(s), e.g. substitution(s) therein not present in the reference (e.g., unmodified or wild-type) TAC. In some embodiments, a BIM that is a variant TACI polypeptide comprises a specific binding fragment of any one of SEQ ID NOS: 529-535, 538-550, 673-681, in which the specific binding fragment binds BAFF, APRIL or a BAFF/APRIL heterotrimer, and contains a contiguous sequence therein that contains the amino acid modification(s), e.g. substitution (s) therein not present in the reference (e.g., unmodified or wild-type) TACI.

[0384] In some embodiments, a BIM that is a variant TACI polypeptide consists or consists essentially of the sequence set forth in any one of SEQ ID NOS: 529-535, 538-550, 673-681. In some embodiments, a BIM that is a variant TACI polypeptide consists or consists essentially of a polypeptide sequence that exhibits at least 90% identity, at least 91% identity, at least 92% identity, at least 93% identity, at least 94% identity, at least 95% identity, such as at least 96% identity, 97% identity, 98% identity, or 99% identity to any one of SEQ ID NOS: 529-535, 538-550, 673-681, and retains the amino acid modification(s), e.g. substitution(s) therein not present in the reference (e.g., unmodified or wild-type) TAC. In some embodiments, a BIM that is a variant TACI polypeptide consists or consists essentially of a specific binding fragment of any one of SEQ ID NOS: 529-535, 538-550, 673-681, in which the specific binding fragment binds BAFF, APRIL or a BAFF/APRIL heterotrimer, and contains a contiguous sequence therein that contains the amino acid modification(s), e.g. substitution (s) therein not present in the reference (e.g., unmodified or wild-type) TACI.

[0385] In some embodiments, a BIM that is a variant TACI polypeptide is one in which the variant TACI polypeptide comprises the sequence set forth in SEQ ID NO:535. In some embodiments, the variant TACI polypeptide consists essentially of the sequence set forth in SEQ ID NO:535. In some embodiments, the variant TACI polypeptide consists of the sequence set forth in SEQ ID NO:535.

[0386] In some embodiments, a BIM that is a variant TACI polypeptide is one in which the variant TACI polypeptide comprises the sequence set forth in SEQ ID NO:541. In some embodiments, the variant TACI polypeptide consists essentially of the sequence set forth in SEQ ID NO:541. In some embodiments, the variant TACI polypeptide consists of the sequence set forth in SEQ ID NO:541.

[0387] In some embodiments, a BIM that is a variant TACI polypeptide is one in which the variant TACI polypeptide comprises the sequence set forth in SEQ ID NO:542. In some embodiments, the variant TACI polypeptide consists essentially of the sequence set forth in SEQ ID NO:542. In some embodiments, the variant TACI polypeptide consists of the sequence set forth in SEQ ID NO:542.

[0388] In some embodiments, a BIM that is a variant TACI polypeptide is one in which the variant TACI polypeptide comprises the sequence set forth in SEQ ID NO:688. In some embodiments, the variant TACI polypeptide consists essentially of the sequence set forth in SEQ ID NO:688. In some embodiments, the variant TACI polypeptide consists of the sequence set forth in SEQ ID NO:688.

[0389] In some embodiments, a BIM that is a variant TACI polypeptide is one in which the variant TACI polypeptide is encoded by a sequence of nucleotides set forth in any of SEQ ID NOS: 552-562, 571 or 572. In some embodiments, the variant TACI polypeptide is encoded by a sequence of nucleotides that exhibits at least 90% identity, at least 91% identity, at least 92% identity, at least 93% identity, at least 94% identity, at least 95% identity, such as at least 96% identity, 97% identity, 98% identity, or 99% identity to any one of SEQ ID NOS: 552-562, 571 or 572, and retains the amino acid modification(s), e.g. substitution(s) therein not present in the reference (e.g., unmodified or wild-type) TACI.

[0390] In some embodiments, a BIM that is a variant TACI polypeptide is one in which the variant TACI polypeptide is encoded by a sequence of nucleotides set forth in any of SEQ ID NOS: 564-570 or 573-585. In some embodiments, the variant TACI polypeptide is encoded by a sequence of nucleotides that exhibits at least 90% identity, at least 91% identity, at least 92% identity, at least 93% identity, at least 94% identity, at least 95% identity, such as at least 96% identity, 97% identity, 98% identity, or 99% identity to any one of SEQ ID NOS: 564-570 or 573-585, and retains the amino acid modification(s), e.g. substitution(s) therein not present in the reference (e.g., unmodified or wild-type) TACI.

TABLE 2
Exemplary variant TACI BIMs

| | | ECD | | ECD | |
|---|---|---|---|---|---|
| | | (CRD1/CRD2) | | (CRD2) | |
| | | AA | NT | AA | NT |
| | | SEQ ID | SEQ ID | SEQ ID | SEQ ID |
| Name | Mutation(s) | NO | NO | NO | NO |
| 516 (WT) TACI | Wild-type | 516 | 551 | 528 | 563 |
| CRD1/CRD2 | | | | | |
| 528 (WT) TACI CRD2 | | | | | |
| 517 TACI CRD1/CRD2 | L82P | 517 | 552 | 673 | |
| 673 TACI CRD2 | | | | | |
| 518 TACI CRD1/CRD2 | D85E, K98T | 518 | 553 | 674 | |
| 674 TACI CRD2 | | | | | |
| 519 TACI CRD1/CRD2 | I87L, K98T | 519 | 554 | 675 | |
| 675 TACI CRD2 | | | | | |
| 520 TACI CRD1/CRD2 | R60G, Q75E, L82P | 520 | 555 | | |
| 521 TACI CRD1/CRD2 | R60G, C86Y | 521 | 556 | | |
| 522 TACI CRD1/CRD2 | A101D | 522 | 557 | 676 | |
| 676 TACI CRD2 | | | | | |
| 523 TACI CRD1/CRD2 | C86Y | 523 | 558 | 677 | |
| 677 TACI CRD2 | | | | | |
| 524 TACI CRD1/CRD2 | W40R, L82P, F103Y | 524 | 559 | | |
| 525 TACI CRD1/CRD2 | W40R, Q59R, T61P, K98T | 525 | 560 | | |
| 526 TACI CRD1/CRD2 | L82P, I87L | 526 | 561 | 678 | |
| 678 TACI CRD2 | | | | | |
| 527 TACI CRD1/CRD2 | G76S, P97S | 527 | 562 | 679 | |
| 679 TACI CRD2 | | | | | |
| 682 TACI CRD1/CRD2 | D85V | 682 | | 529 | 564 |
| 529 TACI CRD2 | | | | | |
| 683 TACI CRD1/CRD2 | E74V | 683 | | 530 | 565 |
| 530 TACI CRD2 | | | | | |
| 684 TACI CRD1/CRD2 | R84L | 684 | | 531 | 566 |
| 531 TACI CRD2 | | | | | |
| 685 TACI CRD1/CRD2 | K77E, R84L, F103Y | 685 | | 532 | 567 |
| 532 TACI CRD2 | | | | | |
| 686 TACI CRD1/CRD2 | Y79F, Q99E | 686 | | 533 | 568 |
| 533 TACI CRD2 | | | | | |
| 687 TACI CRD1/CRD2 | Y79F | 687 | | 534 | 569 |
| 534 TACI CRD2 | | | | | |
| 536 TACI CRD1/CRD2 | R84G | 688 | | 535 | 570 |
| 680 TACI CRD2 | | | | | |
| 536 TACI CRD1/CRD2 | L83S, F103S | 536 | 571 | 680 | |
| 680 TACI CRD2 | | | | | |
| 537 TACI CRD1/CRD2 | L82H | 537 | 572 | 681 | |
| 681 TACI CRD2 | | | | | |
| 689 TACI CRD1/CRD2 | A101D | 689 | | 538 | 573 |
| 538 TACI CRD2 | | | | | |
| 690 TACI CRD1/CRD2 | K77E, R84Q | 690 | | 539 | 574 |
| 539 TACI CRD2 | | | | | |
| 691 TACI CRD1/CRD2 | K77E, A101D | 691 | | 540 | 575 |
| 540 TACI CRD2 | | | | | |
| 692 TACI CRD1/CRD2 | K77E, F78Y, Y102D | 692 | | 541 | 576 |
| 541 TACI CRD2 | | | | | |
| 693 TACI CRD1/CRD2 | Q75E, R84Q | 693 | | 542 | 577 |
| 542 TACI CRD2 | | | | | |
| 694 TACI CRD1/CRD2 | Q75R, R84G, I92V | 694 | | 543 | 578 |
| 543 TACI CRD2 | | | | | |
| 695 TACI CRD1/CRD2 | K77E, A101D, Y102D | 695 | | 544 | 579 |
| 544 TACI CRD2 | | | | | |
| 696 TACI CRD1/CRD2 | R84Q | 696 | | 545 | 580 |
| 545 TACI CRD2 | | | | | |
| 697 TACI CRD1/CRD2 | R84Q, S88N, A101D | 697 | | 546 | 581 |
| 546 TACI CRD2 | | | | | |
| 698 TACI CRD1/CRD2 | K77E | 698 | | 547 | 582 |
| 547 TACI CRD2 | | | | | |
| 699 TACI CRD1/CRD2 | R84Q, F103V | 699 | | 548 | 583 |
| 548 TACI CRD2 | | | | | |
| 700 TACI CRD1/CRD2 | K77E, Q95R, A101D | 700 | | 549 | 584 |
| 549 TACI CRD2 | | | | | |
| 701 TACI CRD1/CRD2 | I87M, A101D | 701 | | 550 | 585 |
| 550 TACI CRD2 | | | | | |
| 769 TACI CRD2 | Q75E | | | 769 | |
| 770 TACI CRD2 | Q75E, K77E | | | 770 | |
| 771 TACI CRD2 | Q75E, F78Y | | | 771 | |
| 772 TACI CRD2 | Q75E, A101D | | | 772 | |
| 773 TACI CRD2 | Q75E, Y102D | | | 773 | |
| 774 TACI CRD2 | K77E, F78Y, R84Q | | | 774 | |
| 775 TACI CRD2 | F78Y | | | 775 | |
| 776 TACI CRD2 | F78Y, R84Q | | | 776 | |
| 777 TACI CRD2 | F78Y, A101D | | | 777 | |
| 778 TACI CRD2 | F78Y, Y102D | | | 778 | |
| 779 TACI CRD2 | R84Q, A101D | | | 779 | |
| 780 TACI CRD2 | R84Q, Y102D | | | 780 | |
| 781 TACI CRD2 | A101D, Y102D | | | 781 | |
| 792 TACI CRD2 | Y102D | | | 792 | |
| 793 TACI CRD2 | K77E, F78Y | | | 793 | |
| 794 TACI CRD2 | K77E, Y102D | | | 794 | |

[0391] In some embodiments, the BIM is or contains a wild-type or unmodified ECD of TACI or a specific binding portion or fragment thereof containing at least one TD (e.g. at least one CRD, such as the CRD 1 and/or CRD2) that binds to APRIL, BAFF and/or an APRIL/BAFF heterotrimer. In some embodiments, the BIM contains the ECD sequence set forth in SEQ ID NO: 709, (ii) a sequence of amino acids that exhibits at least 85%, 86%, 87%, 88%, 89%, 90%, 91%, 92%, 93%, 94%, 95%, 96%, 97%, 98%, 99% or more sequence identity to SEQ ID NO:709 and that binds to APRIL, BAFF or an APRIL/BAFF heterotirmer, or (iii) is a fragment or portion of (i) or (ii) containing a CRD 1 and/or CRD2, in which the portion binds to APRIL, BAFF or an APRI/BAFF heterotrimer. In some embodiments, the BIM is a TACI sequence that consists or consists essentially of the sequence set forth in SEQ ID NO: 709. In some embodiments, the BIM is a TACI sequence containing residues 2-166 of SEQ ID NO:709 that lacks the N-terminal methionine as set forth in SEQ ID NO: 709. In some embodiments, the BIM is a TACI sequence that consists or consists essentially of the sequence set forth as amino acids 2-166 of SEQ ID NO: 709.

[0392] In some embodiments, the BIM is or contains a binding portion of the wild-type or unmodified ECD of TACI or a specific binding portion or fragment thereof that contains the CRD1 and CRD2 of TACI and that binds to APRIL, BAFF and/or an APRIL/BAFF heterotrimer. In some embodiments, the BIM contains the sequence set forth in SEQ ID NO: 719, (ii) a sequence of amino acids that exhibits at least 85%, 86%, 87%, 88%, 89%, 90%, 91%, 92%, 93%, 94%, 95%, 96%, 97%, 98%, 99% or more sequence identity to SEQ ID NO:719 and that binds to APRIL, BAFF or an APRIL/BAFF heterotrimer, or (iii) is a fragment or portion of (i) or (ii) containing a portion of the CRD1 and/or CRD2, in which the portion binds to APRIL, BAFF or an APRI/BAFF heterotrimer. In some embodiments, the BIM comprises the sequence set forth in SEQ ID NO: 719. In some embodiments, the BIM is a TACI sequence that consists or consists essentially of the sequence set forth in SEQ ID NO: 719. In some embodiments, the BIM contains the sequence set forth in SEQ ID NO: 718, (ii) a sequence of amino acids that exhibits at least 85%, 86%, 87%, 88%, 89%, 90%, 91%, 92%, 93%, 94%, 95%, 96%, 97%, 98%, 99% or more sequence identity to SEQ ID NO:718 and that binds to APRIL, BAFF or an APRIL/BAFF heterotrimer, or (iii) is a fragment or portion of (i) or (ii) containing a portion of the CRD1 and/or CRD2, in which the portion binds to APRIL, BAFF or an APRI/BAFF heterotrimer. In some embodiments, the BIM comprises the sequence set forth in SEQ ID NO: 718. In some embodiments, the BIM is a TACI sequence that consists or consists essentially of the sequence set forth in SEQ ID NO: 718. In some embodiments, the BIM contains the sequence set forth in SEQ ID NO: 516, (ii) a sequence of amino acids that exhibits at least 85%, 86%, 87%, 88%, 89%, 90%, 91%, 92%, 93%, 94%, 95%, 96%, 97%, 98%, 99% or more sequence identity to SEQ ID NO:516 and that binds to APRIL, BAFF or an APRIL/BAFF heterotrimer, or (iii) is a fragment or portion of (i) or (ii) containing a portion of the CRD1 and/or CRD2, in which the portion binds to APRIL, BAFF or an APRI/BAFF heterotrimer. In some embodiments, the BIM comprises the sequence set forth in SEQ ID NO: 516. In some embodiments, the BIM is a TACI sequence that consists or consists essentially of the sequence set forth in SEQ ID NO: 516.

[0393] In some embodiments, the BIM is or contains a binding portion of the wild-type or unmodified ECD of TACI or a specific binding portion or fragment thereof that contains only the CRD2 of TACI and that binds to APRIL, BAFF and/or an APRIL/BAFF heterotrimer. In some embodiments, the BIM contains the sequence set forth in SEQ ID NO: 528, (ii) a sequence of amino acids that exhibits at least 85%, 86%, 87%, 88%, 89%, 90%, 91%, 92%, 93%, 94%, 95%, 96%, 97%, 98%, 99% or more sequence identity to SEQ ID NO:528 and that binds to APRIL, BAFF or an APRIL/BAFF heterotrimer, or (iii) is a fragment or portion of (i) or (ii) containing a portion of the CRD2, in which the portion binds to APRIL, BAFF or an APRI/BAFF heterotrimer. In some embodiments, the BIM comprises the sequence set forth in SEQ ID NO: 528. In some embodiments, the BIM is a TACI sequence that consists or consists essentially of the sequence set forth in SEQ ID NO: 528.

[0394] In some embodiments, the BIM is a variant TACI containing an ECD or specific binding portion or fragment thereof having a vTD containing one or more amino acid substitutions (mutations or replacements) relative to a reference TACI sequence. The reference TACI sequence can include any as described in Section II above. The one more amino acid substitutions can include any of the amino acid substitutions described in Section II above. For example, the BIM can be a variant TACI containing an ECD or specific binding fragment thereof having a vTD containing any of the amino acid substitutions set forth in Table 2. In some examples, the mutations are made in a reference TACI containing the sequence of amino acids set forth in SEQ ID NO: 709. In some examples, the mutations are made in a reference TACI that contains the CRD1 and CRD2 domain of TACI, for example as set forth in SEQ ID NO: 516. In some examples, the mutations are made in a reference TACI that is further truncated by deletion of N-terminal and C-terminal amino acid residues to retain the CRD2, for example as set forth in SEQ ID NO: 528.

[0395] In some embodiments, the BIM comprises an extracellular domain (ECD) sequence containing a CRD1 and CRD2, such as a variant TACI polypeptide set forth in any one of SEQ ID NOS: 517-527, 536, 537, 682-701. In some embodiments, the BIM is a variant TACI polypeptide that comprises a polypeptide sequence that exhibits at least 90% identity, at least 91% identity, at least 92% identity, at least 93% identity, at least 94% identity, at least 95% identity, such as at least 96% identity, 97% identity, 98% identity, or 99% identity to any one of SEQ ID NOS: 517-527, 536, 537, 682-701, and retains the amino acid modification(s), e.g. substitution(s) therein not present in the reference (e.g., unmodified or wild-type) TACI. In some embodiments, the BIM is a variant TACI polypeptide that comprises a specific binding fragment of any one of SEQ ID NOS: 517-527, 536, 537, 682-701, in which the specific binding fragment binds BAFF, APRIL or a BAFF/APRIL heterotimer and contains a contiguous sequence therein that contains the amino acid modification(s), e.g. substitution (s) therein not present in the reference (e.g., unmodified or wild-type) TACI.

[0396] In some embodiments, the BIM is a variant TACI polypeptide that consists or consists essentially of a variant TACI extracellular domain (ECD) sequences set forth in any one of SEQ ID NOS: 517-527, 536, 537, 682-701. In some embodiments, the BIM is a variant TACI polypeptide that consists or consists essentially of a polypeptide sequence that exhibits at least 90% identity, at least 91% identity, at least 92% identity, at least 93% identity, at least 94% identity, at least 95% identity, such as at least 96% identity, 97% identity, 98% identity, or 99% identity to any one of SEQ ID NOS: 517-527, 536, 537, 682-701, and retains the amino acid modification(s), e.g. substitution(s) therein not present in the reference (e.g., unmodified or wild-type) TAC. In some embodiments, the BIM is a variant TACI polypeptide that consists or consists essentially of a specific binding fragment of any one of SEQ ID NOS: 517-527, 536, 537, 682-701, in which the specific binding fragment binds BAFF, APRIL or an APRIL/BAFF heterotrimer and contains a contiguous sequence therein that contains the amino acid modification(s), e.g. substitution (s) therein not present in the reference (e.g., unmodified or wild-type) TACI.

[0397] In some embodiments, the BIM is a variant TACI polypeptide that comprises an extracellular domain (ECD) sequences containing a CRD2 but lacking the CRD1 of a reference TACI polypeptide, such as a variant TACI polypeptide set forth in any one of SEQ ID NOS: 529-535, 538-550, 673-681, 769-794. In some embodiments, the BIM is a variant TACI polypeptide that comprises a polypeptide sequence that exhibits at least 90% identity, at least 91% identity, at least 92% identity, at least 93% identity, at least 94% identity, at least 95% identity, such as at least 96% identity, 97% identity, 98% identity, or 99% identity to any one of SEQ ID NOS: 529-535, 538-550, 673-681, and retains the amino acid modification(s), e.g. substitution(s) therein not present in the reference (e.g., unmodified or wild-type) TACI. In some embodiments, the BIM is a variant TACI polypeptide that comprises a specific binding fragment of any one of SEQ ID NOS: 529-535, 538-550, 673-681, 769-794, in which the specific binding fragment binds BAFF, APRIL or a BAFF/APRIL heterotimer and contains a contiguous sequence therein that contains the amino acid modification(s), e.g. substitution (s) therein not present in the reference (e.g., unmodified or wild-type) TACI.

[0398] In some embodiments, the BIM is a variant TACI polypeptide that consists or consists essentially of the sequence set forth in any one of SEQ ID NOS: 529-535, 538-550, 673-681, 769-794. In some embodiments, the BIM is a variant TACI polypeptide that consists or consists essentially of a polypeptide sequence that exhibits at least 90% identity, at least 910% identity, at least 92% identity, at least 93% identity, at least 94% identity, at least 95% identity, such as at least 96% identity, 97% identity, 98% identity, or 99% identity to any one of SEQ ID NOS: 529-535, 538-550, 673-681, 769-794, and retains the amino acid modification(s), e.g. substitution(s) therein not present in the reference (e.g., unmodified or wild-type) TAC. In some embodiments, the BIM is a variant TACI polypeptide that consists or consists essentially of a specific binding fragment of any one of SEQ ID NOS: 529-535, 538-550, 673-681, 769-794, in which the specific binding fragment binds BAFF, APRIL or a BAFF/APRIL heterotrimer, and contains a contiguous sequence therein that contains the amino acid modification(s), e.g. substitution (s) therein not present in the reference (e.g., unmodified or wild-type) TACI.

[0399] In some embodiments, the BIM is a variant TACI polypeptide that comprises the sequence set forth in SEQ ID NO:535. In some embodiments, the BIM is a variant TACI polypeptide that consists essentially of the sequence set forth in SEQ ID NO:535. In some embodiments, the BIM is a variant TACI polypeptide that consists of the sequence set forth in SEQ ID NO:535.

[0400] In some embodiments, the BIM is a variant TACI polypeptide that comprises the sequence set forth in SEQ ID NO:541. In some embodiments, the BIM is a variant TACI polypeptide that consists essentially of the sequence set forth in SEQ ID NO:541. In some embodiments, the BIM is a variant TACI polypeptide that consists of the sequence set forth in SEQ ID NO:541.

[0401] In some embodiments, the BIM is a variant TACI polypeptide that comprises the sequence set forth in SEQ ID NO:542. In some embodiments, the BIM is a variant TACI polypeptide that consists essentially of the sequence set forth in SEQ ID NO:542. In some embodiments, the BIM is a variant TACI polypeptide consists of the sequence set forth in SEQ ID NO:542.

[0402] In some embodiments, the BIM is a variant TACI polypeptide that comprises the sequence set forth in SEQ ID NO:688. In some embodiments, the BIM is a variant TACI polypeptide that consists essentially of the sequence set forth in SEQ ID NO:688. In some embodiments, the BIM is a variant TACI polypeptide that consists of the sequence set forth in SEQ ID NO:688.

[0403] 2. BCMA

[0404] In some embodiments, the BIM is or contains a wild-type BCMA ECD or a specific binding portion or fragment thereof containing a TD (e.g. a CRD) that binds to APRIL, BAFF and/or an APRIL/BAFF heterotrimer. In some embodiments, the BIM is or contains a variant BCMA ECD or a specific binding portion or fragment thereof containing a TD (e.g. a CRD) that binds to APRIL, BAFF and/or an APRIL/BAFF heterotrimer. In some embodiments, the BIM is a BCMA polypeptide or variant thereof with any of the sequences set forth in Section II above (e.g. Table 1).

[0405] In some embodiments, the BIM is or contains a wild-type or unmodified ECD of BCMA or a specific binding portion or fragment thereof containing a TD (e.g. a CRD) that binds to APRIL, BAFF and/or an APRIL/BAFF heterotrimer. In some embodiments, the BIM contains the ECD sequence set forth in SEQ ID NO: 710, (ii) a sequence of amino acids that exhibits at least 85%, 86%, 87%, 88%, 89%, 90%, 91%, 92%, 93%, 94%, 95%, 96%, 97%, 98%, 99% or more sequence identity to SEQ ID NO:710 and that binds to APRIL, BAFF or an APRIL/BAFF heterotrimer, or (iii) is a fragment or portion of (i) or (ii) containing a CRD, in which the portion binds to APRIL, BAFF or an APRI/BAFF heterotrimer. In some embodiments, the BIM is a BCMA sequence that consists or consists essentially of the sequence set forth in SEQ ID NO: 710. In some embodiments, the BIM is a BCMA sequence containing residues 2-54 of SEQ ID NO:710 that lacks the N-terminal methionine as set forth in SEQ ID NO: 710. In some embodiments, the BIM is a BCMA sequence that consists or consists essentially of the sequence set forth as amino acids 2-54 of SEQ ID NO: 710.

[0406] In some embodiments, the BIM contains the sequence set forth in SEQ ID NO: 356, (ii) a sequence of amino acids that exhibits at least 85%, 86%, 87%, 88%, 89%, 90%, 91%, 92%, 93%, 94%, 95%, 96%, 97%, 98%, 99% or more sequence identity to SEQ ID NO:356 and that binds to APRIL, BAFF or an APRIL/BAFF heterotrimer, or (iii) is a fragment or portion of (i) or (ii) containing a portion of a CRD, in which the portion binds to APRIL, BAFF or an APRI/BAFF heterotrimer. In some embodiments, the BIM comprises the sequence set forth in SEQ ID NO: 356. In some embodiments, the BIM is a BCMA sequence that consists or consists essentially of the sequence set forth in SEQ ID NO: 356.

[0407] In some embodiments, the BIM is a variant BCMA containing an ECD or specific binding portion or fragment thereof having a vTD containing one or more amino acid substitutions (mutations or replacements) relative to a reference BCMA sequence. The reference BCMA sequence can include any as described in Section II above. The one more amino acid substitutions can include any of the amino acid substitutions described in Section II above. For example, the BIM can be a variant BCMA containing an ECD or specific binding fragment thereof having a vTD containing any of the amino acid substitutions set forth in Table 1. In some examples, the mutations are made in a reference BCMA containing the sequence of amino acids set forth in SEQ ID NO: 710. In some examples, the mutations are made in a reference BCMA that contains the CRD domain of BCMA. In some examples, the mutations are made in a reference BCMA set forth in SEQ ID NO: 356.

[0408] In some embodiments, the BIM comprises a variant BCMA polypeptide set forth in any one of SEQ ID NOS: 357-435. In some embodiments, the BIM is a variant BCMA polypeptide that comprises a polypeptide sequence that exhibits at least 90% identity, at least 910% identity, at least 92% identity, at least 93% identity, at least 94% identity, at least 95% identity, such as at least 96% identity, 97% identity, 98% identity, or 99% identity to any one of SEQ ID NOS: 357-435, and retains the amino acid modification(s), e.g. substitution(s) therein not present in the reference (e.g., unmodified or wild-type) BCMA. In some embodiments, the BIM is a variant BCMA polypeptide that comprises a specific binding fragment of any one of SEQ ID NOS: 357-435, in which the specific binding fragment binds BAFF, APRIL or a BAFF/APRIL heterotimer and contains a contiguous sequence therein that contains the amino acid modification(s), e.g. substitution (s) therein not present in the reference (e.g., unmodified or wild-type) BCMA.

[0409] In some embodiments, the BIM is a variant BCMA polypeptide that consists or consists essentially of a variant BCMA extracellular domain (ECD) sequences set forth in any one of SEQ ID NOS: 357-435. In some embodiments, the BIM is a variant BCMA polypeptide that consists or consists essentially of a polypeptide sequence that exhibits at least 90% identity, at least 910% identity, at least 92% identity, at least 93% identity, at least 94% identity, at least 95% identity, such as at least 96% identity, 97% identity, 98% identity, or 99% identity to any one of SEQ ID NOS: 357-435, and retains the amino acid modification(s), e.g. substitution(s) therein not present in the reference (e.g., unmodified or wild-type) BCMA. In some embodiments, the BIM is a variant BCMA polypeptide that consists or consists essentially of a specific binding fragment of any one of SEQ ID NOS: 357-435, in which the specific binding fragment binds BAFF, APRIL or an APRIL/BAFF heterotrimer and contains a contiguous sequence therein that contains the amino acid modification(s), e.g. substitution (s) therein not present in the reference (e.g., unmodified or wild-type) BCMA.

[0410] In some embodiments, the BIM is a variant BCMA polypeptide that comprises the sequence set forth in SEQ ID NO:381. In some embodiments, the BIM is a variant BCMA polypeptide that consists essentially of the sequence set forth in SEQ ID NO:381. In some embodiments, the BIM is a variant BCMA polypeptide that consists of the sequence set forth in SEQ ID NO:381.

[0411] In some embodiments, the BIM is a variant BCMA polypeptide that comprises the sequence set forth in SEQ ID NO:405. In some embodiments, the BIM is a variant BCMA polypeptide that consists essentially of the sequence set forth in SEQ ID NO:405. In some embodiments, the BIM is a variant BCMA polypeptide that consists of the sequence set forth in SEQ ID NO:405.

[0412] In some embodiments, the BIM is a variant BCMA polypeptide that comprises the sequence set forth in SEQ ID NO:406. In some embodiments, the BIM is a variant BCMA polypeptide that consists essentially of the sequence set forth in SEQ ID NO:406. In some embodiments, the BIM is a variant BCMA polypeptide that consists of the sequence set forth in SEQ ID NO:406.

[0413] In some embodiments, the BIM is a variant BCMA polypeptide that comprises the sequence set forth in SEQ ID NO:410. In some embodiments, the BIM is a variant BCMA polypeptide that consists essentially of the sequence set forth in SEQ ID NO:410. In some embodiments, the BIM is a variant BCMA polypeptide that consists of the sequence set forth in SEQ ID NO:410.

[0414] In some embodiments, the BIM is a variant BCMA polypeptide that comprises the sequence set forth in SEQ ID NO:411. In some embodiments, the BIM is a variant BCMA polypeptide that consists essentially of the sequence set forth in SEQ ID NO:411. In some embodiments, the BIM is a variant BCMA polypeptide that consists of the sequence set forth in SEQ ID NO:411.

[0415] B. T Cell Inhibitory Molecule (TIM)

[0416] In some embodiments, the provided immunomodulatory protein contains a TIM that binds to a T cell stimulatory receptor or to a ligand of a T cell stimulatory receptor. In some aspects, the T cell stimulatory receptor comprises a cytoplasmic region containing an immunoreceptor tyrosine-based activation motif (ITAM) or a cytoplasmic region that interacts with one or more adaptor protein involved in a signal transduction pathway in a cell to induce, mediate or potentiate activation of a T cell. In some embodiment, the adaptor protein contains a binding domain specific to a phosphotyrosine residue in a cytoplasmic region of stimulatory receptor. In some embodiments, the T cell stimulatory receptor includes a component of a TCR complex or is a co-receptor or costimulatory molecule that augments or enhances TCR signaling. In some embodiments, the T cell stimulatory receptor is a TCR, CD3, CD4, CD8, CD28, ICOS or CD2, including any mammalian orthologs thereof. In some embodiments, the T cell stimulatory receptor target is a human TCR, human CD3, human CD4, human CD8, human CD28, human ICOS or human CD2. In some embodiments, the T cell stimulatory receptor is expressed on a human T cell.

[0417] In some embodiments, the TIM binds directly to a T cell stimulatory receptor, such as directly to a component of a TCR complex or a co-receptor or costimulatory molecule that augments or enhances TCR signaling. In some embodiments, the TIM binds to a TCR, CD3, CD4, CD8, CD28, ICOS or CD2, including any mammalian orthologs thereof. In some embodiments, the TIM binds to a human TCR, human CD3, human CD4, human CD8, human CD28, human ICOS or human CD2.

[0418] In some cases, the TIM binds to a ligand of a T cell stimulatory receptor. In some embodiments, the TIM binds to a ligand of a component of a TCR complex or a ligand of a co-receptor or costimulatory molecule that augments or enhances TCR signaling. In some embodiments, the TIM binds to a ligand of a TCR, CD3, CD4, CD8, CD28, ICOS or CD2 molecule, including such molecules expressed on a T cell, e.g. a human T cell. In some embodiments, the TIM binds to a ligand of CD28, such as a ligand of CD28 expressed on a T cell, e.g. a human T cell. In some embodiments, the ligand is a CD80 or a CD86, such as a human CD80 or human CD86. In some embodiments, the ligand is expressed on an APC.

[0419] In some embodiments, the TIM is an antibody or antigen-binding fragment that binds to a T cell stimulatory receptor or binds to a ligand of a T cell stimulatory receptor. In some embodiments, the TIM is an antibody or antigen-binding fragment that binds to a TCR, CD3, CD4, CD8, CD28, ICOS or CD2, including any mammalian orthologs thereof. In some embodiments, the antibody or antigen-binding fragment binds to a human TCR, human CD3, human CD4, human CD8, human CD28, human ICOS or human CD2, including such molecules expressed on a human T cell. In some embodiments, the antibody or antigen-binding fragment binds to CD80 or CD86. In some embodiments, the antibody or antigen-binding fragment binds to a human CD80 or human CD86, including such molecules expressed on a human APC.

[0420] In some embodiments, the TIM is or contains a binding partner of a T cell stimulatory receptor or a ligand of a T cell stimulatory receptor. Among molecules that can be used as a TIM are extracellular domains of IgSF protein member, particularly IgSF members that are T cell stimulatory receptors or their ligands.

[0421] In some aspects, the TIM is or contains an IgD of an IgSF family member that binds to an T cell stimulatory receptor, such as binds to TCR, CD3, CD4, CD8, CD28, ICOS or CD2, or is a specific fragment or vIgD thereof that binds to the T cell stimulatory receptor. In particular embodiments, the T cell stimulatory receptor is CD28 or ICOS and the TIM binds to CD28 or ICOS. Exemplary IgSF family members that are binding partners of or that bind to CD28 or ICOS include, for example, CD80, CD86 and ICOSL, such as human CD80, CD86 or ICOSL. In some examples, the TIM is or contains an IgD of a wild-type CD80, CD86 or ICOSL or is or contains a vIgD thereof, wherein the TIM specifically binds to CD28.

[0422] In other aspects, the TIM is or contains an IgD of an IgSF family member that binds to a ligand of a T cell stimulatory receptor, such as binds to CD80 or CD86, or is a specific fragment or vIgD thereof that binds to the ligand of the T cell stimulatory receptor. Exemplary IgSF family members that are binding partners of or that bind to CD80 or CD86 include, for example, CTLA-4, such as human CTLA-4. In some examples, the TIM is or contains an IgD of a wild-type CTLA-4 or is or contains a vIgD thereof, wherein the TIM specifically binds to CD80 or CD86. Exemplary sequences for inclusion as a TIM in the provided multi-domain immunomodulatory proteins include molecules described in International PCT published Appl. No. WO2019/074983.

[0423] In some embodiments, the multi-domain immunomodulatory protein provided herein are soluble proteins and/or do not contain a portion that includes a transmembrane domain. Those of skill will appreciate that cell surface proteins, including proteins of the IgSF, typically have an intracellular domain, a transmembrane domain, and extracellular domain (ECD), and that a soluble form of such proteins can be made using the extracellular domain or an immunologically active subsequence thereof. Thus, in some embodiments, the TIM lacks a transmembrane domain or a portion of the transmembrane domain of an IgSF member. In some embodiments, the TIM lacks the intracellular (cytoplasmic) domain or a portion of the intracellular domain of an IgSF member. In some embodiments, the TIM only contains the ECD domain or a portion thereof containing an IgSF domain, such an IgV domain, or specific binding fragments thereof.

[0424] For example, in some aspects, the TIM is or contains an ECD of an IgSF receptor, or a specific binding portion or fragment thereof containing at least one IgD (e.g. IgV), that binds to a ligand of the T cell stimulatory receptor. For example, the TIM can contain an ECD of CTLA-4, or a specific binding portion or fragment of CTLA-4 containing at least one IgD (e.g. IgV), that binds to CD80 or CD86. In some embodiments, the TIM consists or consists essentially of an ECD of a an IgSF receptor, or a specific binding portion or fragment thereof containing at least one IgD (e.g. IgV), such as consists or consists essentially of the ECD of CTLA-4 or a specific binding portion or fragment of the ECD of CTLA-4 that contains an IgD (e.g. IgV). In some embodiments, the TIM is less than the full length sequence of the ECD of the receptor of the ligand of the T cell stimulatory receptor. In some embodiments, the TIM is or only contains one vIgD (e.g. IgV) or a specific binding fragment of the only one vIgD (e.g. IgV). In some embodiments, the TIM consists or consists essentially of an IgV of a receptor of the ligand of the T cell stimulatory receptor, such as consists or consists essentially of only the IgV of CTLA-4. In some embodiments, the sequence of the TIM containing an ECD or binding portion or fragment thereof containing a IgD (e.g. IgV) is a mammalian sequence that includes, but is not limited to, human, mouse, cynomolgus monkey, or rat. In some embodiments, the TIM sequence is human and/or binds a human protein.

[0425] In some aspects, the vIgD is an affinity-modified domain that exhibits increased binding activity, such as increased binding affinity, for the T cell stimulatory receptor or the ligand of the T cell stimulatory receptor compared to the binding activity of the unmodified or wild-type IgD for the same molecule. In some embodiment, the TIM contains a vIgD with one or more amino acid substitutions compared to an IgD of an IgSF member, e.g. CTLA-4 o, in which, the one or more amino acid substitutions confer or result in increased binding affinity to a cognate binding partner that is a T cell stimulatory receptor or a ligand of the T cell stimulatory receptor.

[0426] In some embodiments, the TIM is or contains a vIgD that contains one or more amino acids modifications, such as one or more substitutions (alternatively, “mutations” or “replacements”), deletions or additions, in an IgD relative to a wild-type or unmodified IgD of a binding partner of the T cell stimulatory receptor or a ligand of the T cell stimulatory receptor. In some aspects, the vIgD contains up to 1, 2, 3, 4, 5, 6, 7, 8, 9, 10, 11, 12, 13, 14, 15, 16, 17, 18, 19 or 20 amino acid modifications, such as amino acid substitutions, deletions or additions in an IgD domain of an IgSF binding partner of a T cell stimulatory receptor or a ligand of a T cell stimulatory receptor. The modifications (e.g., substitutions) can be in the IgV domain or the IgC domain. In some embodiments, the vIgD has up to 1, 2, 3, 4, 5, 6, 7, 8, 9, 10, 11, 12, 13, 14, 15, 16, 17, 18, 19, or 20 amino acid modifications (e.g., substitutions) in the IgV domain or specific binding fragment thereof. In some embodiments, the vIgD has up to 1, 2, 3, 4, 5, 6, 7, 8, 9, 10, 11, 12, 13, 14, 15, 16, 17, 18, 19, or 20 amino acid modifications (e.g., substitutions) in the IgC domain or specific binding fragment thereof. In some embodiments, the vIgD has at least about 85%, 86%, 86%, 88%, 89%, 90%, 91%, 92%, 93%, 94%, 95%, 96%, 97%, 98%, or 99% sequence identity with the wild-type or unmodified IgD or specific binding fragment thereof.

[0427] Non-limiting examples of a TIM in the provided multidomain immunomodulatory proteins are described in the following subsections. Any of the described TIMs herein can be combined with a BIM as described in Section III.A.

[0428] 1. Ligand-Binding TIM, e.g. CTLA-4

[0429] Provided herein are immunomodulatory proteins containing a T cell molecule (TIM) that binds to a ligand of a T cell stimulatory receptor. In some aspects, the T cell stimulatory receptor is CD28, e.g. human CD28, and/or the ligand of the T cell stimulatory receptor is CD80 or CD86, e.g. human CD80 or human CD86. In some embodiments, the TIM of the immunomodulatory protein binds to the extracellular portion or ectodomain of CD80 or CD86. In some embodiments, the TIM binds to CD80 or CD86 on the surface of a cell, such as on the surface of an APC.

[0430] In some embodiments, the TIM is an antibody that binds CD80 or CD86 or is an antigen-binding antibody fragment thereof (e.g. Fab or scFv). In some embodiments, the antibody or antigen-binding antibody fragment binds human CD80 or human CD86. In some embodiments, the antibody is a single chain variable fragment (e.g. scFv) containing a V_{H} and V_{L} of an anti-CD80 antibody or antigen-binding fragment or an anti-CD86 antibody or antigen-binding fragment.

[0431] In some embodiments, the TIM is or contains an IgD (e.g. IgV) or a specific binding fragment thereof, such as an unmodified or wild-type IgD or a vIgD or a specific binding fragment thereof, of an IgSF family member that binds CD80 or CD86, such as human CD80 or human CD86. In some embodiments, the TIM is or contains one or more IgD that is an IgD, or a vIgD thereof, of a CTLA-4 polypeptide, such as a wild-type CTLA-4, e.g. a human CTLA-4. In some aspects, the TIM contains one or more IgD (e.g. IgV) that is an vIgD containing one or more amino acid modifications (e.g., substitutions, deletions or additions) compared to an IgD of a wild-type or unmodified CTLA-4, which, in some aspects, result in increased binding of the TIM to CD80 or CD86. Exemplary IgDs or vIgDs of CTLA-4 binding partners for inclusion as an TIM in the provided immunomodulatory proteins are described. In some embodiments, the TIM is or contains a vIgD polypeptide that exhibit increased binding activity, such as binding affinity, for CD80 or CD86 compared to a corresponding wild-type or unmodified IgD. Exemplary IgDs or vIgDs of CTLA-4 for use as a TIM in the provided multi-domain immunomodulatory proteins include molecules described in International PCT published Appl. No. WO2019/074983.

[0432] CTLA-4 has been exploited as a therapeutic drug for treating autoimmune disease by attenuating T cell activation through modulation of CD80 and/or CD86 interactions. Specifically, abatacept and belatacept are FDA approved therapeutics for use in rheumatoid arthritis and transplant setting, respectively. Abatacept is wild-type CTLA-4 IgSF domain fused to an Fc portion of an antibody. The sequence of the CTLA-4 portion of abatacept is set forth in SEQ ID NO: 1. Belatacept is a modified variant of CTLA-4 IgSF domain, containing a substitution of tyrosine for the alanine at position 31 and a glutamic acid for the leucine at position 106 (A31Y/L106E), corresponding to positions 31 and 106 of the wild-type reference CTLA-4 ECD sequence set forth in SEQ ID NO: 1, to confer increased affinity toward CD80 and CD86 ligands (Kremer et al., N Engl J Med. 2003; 349(20):1907-1915; Larsen et al, Am J Transplant. 2005; 5(3):443-453). The sequence of the CTLA-4 portion of belatacept is set forth as SEQ ID NO: 672.

[0433] In some embodiments, the TIM is not the full length sequence of the CTLA-4. In some aspects, the TIM is a soluble polypeptide, is not membrane-expressed and/or lacks the transmembrane and/or cytoplasmic domain of CTLA-4. In some embodiments, the TIM only contains an extracellular domain (ECD) or a specific binding fragment thereof containing a IgD or vIgD, such as only contains an IgV domain or an IgC domain or specific binding fragment thereof, or combinations thereof.

[0434] In some embodiments, the TIM is or contains the ECD sequence set forth in SEQ ID NO:1 or is a specific binding fragment thereof. In some embodiments, the TIM is or contains the ECD sequence set forth in SEQ ID NO:2 or is a specific binding fragment thereof. In some embodiments, the TIM is or contains an IgD (e.g. IgV) sequence of CTLA-4, such as human CTLA-4. In some embodiments, the TIM is or contain an IgD (e.g. IgV) sequence set forth in SEQ ID NO: 191, or is a specific binding fragment thereof.

(SEQ ID NO: 1)
[sequence omitted]
(SEQ ID NO: 2)
KAMHVAQPAVVLASSRGIASFVCEYASPGKATEVR
VTVLRQADSQVTEVCAATYMMGNELTFLDDSICTG
TSSGNQVNLTIQGLRAMDTGLYICKVELMYPPPYY
LGIGNGTQIYVIDPEPCPDSDQ
(SEQ ID NO: 191)
HVAQPAVVLASSRGIASFVCEYASPGKATEVRVTV
LRQADSQVTEVCAATYMMGNELTFLDDSICTGTSS
GNQVNLTIQGLRAMDTGLYICKVELMYPPPYY

[0435] In some embodiments, the TIM contains the sequence set forth in SEQ ID NO: 1, (ii) a sequence of amino acids that exhibits at least 85%, 86%, 87%, 88%, 89%, 90%, 91%, 92%, 93%, 94%, 95%, 96%, 97%, 98%, 99% or more sequence identity to SEQ ID NO:1 and that binds to CD80 or CD86, or (iii) is a fragment or portion of (i) or (ii) containing an IgD (e.g. IgV) in which the portion binds to CD80 or CD86. In some embodiments, the TIM comprises the sequence set forth in SEQ ID NO: 1. In some embodiments, the TIM is a CTLA-4 sequence that consists or consists essentially of the sequence set forth in SEQ ID NO: 1.

[0436] In some embodiments, the TIM contains the sequence set forth in SEQ ID NO: 2, (ii) a sequence of amino acids that exhibits at least 85%, 86%, 87%, 88%, 89%, 90%, 91%, 92%, 93%, 94%, 95%, 96%, 97%, 98%, 99% or more sequence identity to SEQ ID NO:2 and that binds to CD80 or CD86, or (iii) is a fragment or portion of (i) or (ii) containing an IgD (e.g. IgV) in which the portion binds to CD80 or CD86. In some embodiments, the TIM comprises the sequence set forth in SEQ ID NO: 2. In some embodiments, the TIM is a CTLA-4 sequence that consists or consists essentially of the sequence set forth in SEQ ID NO: 2.

[0437] In some embodiments, the TIM contains the sequence set forth in SEQ ID NO: 191, (ii) a sequence of amino acids that exhibits at least 85%, 86%, 87%, 88%, 89%, 90%, 91%, 92%, 93%, 94%, 95%, 96%, 97%, 98%, 99% or more sequence identity to SEQ ID NO: 191 and that binds to CD80 or CD86, or (iii) is a fragment or portion of (i) or (ii) containing an IgD (e.g. IgV) in which the portion binds to CD80 or CD86. In some embodiments, the TIM comprises the sequence set forth in SEQ ID NO: 191. In some embodiments, the TIM is a CTLA-4 sequence that consists or consists essentially of the sequence set forth in SEQ ID NO: 191.

[0438] In some embodiments, the immunomodulatory protein contains a TIM that is or contains a vIgD containing one or more amino acid modifications, e.g. substitutions, in an IgD of a wild-type or unmodified CTLA-4. In some embodiments, modifications provided herein can be in an TIM containing an unmodified IgD set forth in SEQ ID NO: 1, 2 or 191 or in a sequence that has 85%, 85%, 87%, 88%, 89%, 90%, 91%, 92%, 93%, 94%, 95%, 96%, 97%, 98%, 99% or more sequence identity to SEQ ID NO: 1, 2 or 191. In some embodiments, an TIM containing a vIgD of CTLA-4 has at least about 85%, 86%, 86%, 88%, 89%, 90%, 91%, 92%, 93%, 94%, 95%, 96%, 97%, 98%, or 99% sequence identity with the sequence set forth in any of SEQ ID NOs: 1, 2 or 191.

[0439] In some embodiments, the TIM is or contains a vIgD that is an affinity-modified IgSF domain that has an increased binding activity, such as binding affinity, for CD80 or CD86 relative to the binding activity of the wild-type or unmodified IgD for CD80 or CD86. In some embodiments, the increase in binding activity, e.g. binding affinity, for CD80 or CD86 is increased at least about 5%, such as at least about 10%, 15%, 20%, 25%, 35%, 50%, 75%, 100%, 200% or more. In some embodiments, the increase in binding activity, e.g. binding affinity, is more than 1.2-fold, 1.5-fold, 2-fold, 3-fold, 4-fold, 5-fold, 6-fold, 7-fold, 8-fold, 9-fold, 10-fold, 20-fold, 30-fold 40-fold, or 50-fold. In such examples, the wild-type or unmodified IgD has the same sequence as the vIgD except that it does not contain the one or more amino acid modifications (e.g. substitutions).

[0440] In some embodiments, the equilibrium dissociation constant (K_{d}) of the TIM to CD80 or CD86 can be less than 1×10⁻⁵ M, 1×10⁻⁶ M, 1×10⁻⁷ M, 1×10⁻⁸ M, 1×10⁻⁹ M, 1×10⁻¹⁰ M or 1×10⁻¹¹M, or 1×10⁻¹² M or less. In some embodiments, the TIM binds to CD80 or CD86 with a K_{d} of from or from about 100 pm to 5000 pm, 100 pm to 2000 pm, 100 pm to 1500 pm, 100 pm to 1000 pm, 100 pm to 800 pm, 100 pm to 500 pm, 100 pm to 400 pm, 400 pm to 4000 pm, 400 pm to 2000 pm, 400 pm to 1500 pm, 400 pm to 1000 pm, 400 pm to 800 pm, 400 pm to 500 pm, 500 pm to 5000 pm, 500 pm to 2000 pm, 500 pm to 1500 pm, 500 pm to 1000 pm, 500 pm to 800 pm, 800 pm to 5000 pm, 800 pm to 2000 pm, 800 pm to 1500 pm, 800 pm to 1000 pm, 1000 pm to 5000 pm, 1000 pm to 2000 pm, 1000 pm to 1500 pm, 1500 pm to 5000 pm, 1500 to 2000 pm to 2000 pm to 50000 pm. In some embodiments, the TIM binds to CD80 or CD86 with a K_{d} of less than 200 pM, 300 pM, 400 pM, 500 pM. In some embodiments, the TIM binds to CD80 or CD86 with a K_{d} of greater than or greater than about 500 pm but less than or less than about 2000 pm, such as from or from about 500 pm to 1500 pm, 500 pm to 1250 pm, 500 pm to 1000 pm, 500 pm to 750 pm, 750 pm to 1500 pm, 750 pm to 1250 pm, 750 pm to 1000 pm, 1000 pm to 2000 pm, 1000 pm to 1500 pm or 1500 pm to 2000 pm.

[0441] Unless stated otherwise, the amino acid modification(s) present in a vIgD of a CTLA-4 ECD or an IgD (e.g. IgV) thereof are designated by amino acid position number corresponding to the numbering of positions of the unmodified ECD sequence set forth in SEQ ID NO:1 or 2. It is within the level of a skilled artisan to identify the corresponding position of a modification, e.g. amino acid substitution, in an ECD or a portion thereof containing an IgSF domain (e.g. IgV) thereof, such as by alignment of a reference sequence with SEQ ID NOs: 1 or 2. In the listing of modifications throughout this disclosure, the amino acid position is indicated in the middle, with the corresponding unmodified (e.g. wild-type) amino acid listed before the number and the identified variant amino acid substitution listed after the number. If the modification is a deletion of the position a “del” is indicated and if the modification is an insertion at the position an “ins” is indicated. In some cases, an insertion is listed with the amino acid position indicated in the middle, with the corresponding unmodified (e.g. wild-type) amino acid listed before and after the number and the identified variant amino acid insertion listed after the unmodified (e.g. wild-type) amino acid.

[0442] In some embodiments, the TIM contains a vIgD that has up to 1, 2, 3, 4, 5, 6, 7, 8, 9, 10, 11, 12, 13, 14, 15, 16, 17, 18, 19, or 20 amino acid modifications, e.g. substitutions. The one or more amino acid modifications, e.g. substitutions, can be in the ectodomain (extracellular domain) of the wild-type or unmodified CTLA-4. In some embodiments, the one or more amino acid modifications, e.g. substitutions, are in the ECD domain of CTLA-4 or a specific binding fragment thereof. In some embodiments, the one or more amino acid modifications, e.g. substitutions, are in the IgV domain of CTLA-4 or a specific binding fragment thereof. In some embodiments, the one or more amino acid modifications, e.g. substitutions, are in an IgC domain of CTLA-4 or a specific binding fragment thereof. In some embodiments, the one or more amino acid modifications, e.g. substitutions, are in the IgV domain of CTLA-4 or a specific binding fragment thereof and in an IgC domain or domains of CTLA-4 or a specific binding fragment thereof.

[0443] In some embodiments, the TIM is or contains a vIgD that has one or more amino modification, e.g. substitutions, in an unmodified IgD of CTLA-4 or specific binding fragment thereof corresponding to position(s) 6, 10, 12, 14, 15, 16, 18, 19, 20, 22, 24, 26, 27, 28, 29, 30, 31, 33, 35, 37, 38, 41, 42, 43, 45, 46, 47, 48, 53, 54, 55, 56, 58, 59, 61, 63, 64, 65, 67, 69, 71, 72, 73, 75, 76, 82, 85, 86, 87, 89, 91, 93, 95, 96, 97, 98, 99, 105, 106, 108, 110, 113, 115, 116, 117,118, 119, 120, 121, 122, 124, 125 and/or 126 with reference to positions set forth in SEQ ID NO:1.

[0444] In some embodiments, the TIM contains a vIgD that has one or more amino acid modification, e.g. substitutions, in an unmodified CTLA-4 or specific binding fragment thereof corresponding to position(s) 12, 18, 26, 29, 31, 53, 56, 58, 63, 72, 98, 99, 105, 106, and/or 117 with reference to positions set forth in SEQ ID NO:1 or 2. In some embodiments, the TIM is or contains a vIgD of CTLA-4 that has one or more amino acid modifications selected from L12F, L12H, L12P, 118A, I18F, I18N, I18T, I18V, A26D, A26S, A26T, G29R, G29W, A31Y, T53S, M56K, M56L, M56R, M56T, M56V, N58D, N58S, L63H, L63P, S72G, S72T, L98Q, L98R, M99I, M99L, Y105F, Y105L, L106E, L106I, L106R, I117E, I117L, I117M, and/or I117T, or a conservative amino acid substitution thereof.

[0445] In some embodiments, the TIM is or contains a vIgD of CTLA-4 that has one or more amino acid modifications selected from A6T, V10A, L12F, L12H, L12I, L12P, S14N, S15P, R16C, R16G, R16H, I18A, I18F, I18N, I18T, I18V, A19V, S20N, V22A, V22I, E24Q, A26D, A26S, A26T, S27P, P28L, G29R, G29W, K30R, A31Y, E33M, E33V, R35K, T37S, V38I, Q41L, A42S, A42T, A42V, D43N, Q45H, V46E, T47A, E48R, T53S, Y54F, M55R, M55T, M55V, M56K, M56L, M56R, M56T, M56V, N58D, N58S, E59D, E59G, T61A, T61I, T61N, T61R, T61S, L63H, L63P, D64E, D64N, D64V, D65G, I67N, I67T, I67V, T69A, T69I, T69S, T71A, T71I, S72G, S72T, S73R, N75D, Q76R, Q82H, Q82R, R85G, A86T, M87A, M87K, M87T, M87V, T89A, T89M, T89S, L91R, I93L, I93V, K95R, V96I, E97Q, L98Q, L98R, M99I, M99L, Y105F, Y105L, L106E, L106I, L106N, L106R, L106V, I108F, I108V, N110K, N110S, N110Y, Q113H, Y115H, Y115N, V116A, I117E, I117K, I117L, I117M, I117T, P119H, E120D, P121S, C122P, D124P, D1241, S1251, S125P, D126P, and/or D126T, or a conservative amino acid substitution thereof. In some embodiments, the TIM is or contains a vIgD that has one or more amino acid modification from L12F, L12H, L12I, L12P, 118A, 118F, 118N, 118T, 118V, A26D, A26S, A26T, G29R, G29W, E33M, E33V, T53S, M55R, M55T, M55V, M56K, M56L, M56R, M56T, M56V, N58D, N58S, L63H, L63P, S72G, S72T, M87A, M87K, M87T, M87V, L98Q, L98R, M99I, M99L, Y105F, Y105L, L106I, L106N, L106R, L106V, I117E, I117K, I117L, I117M, and/or I117T, or a conservative amino acid substitution thereof. In some embodiments, the TIM is or contains a vIgD that has one or more amino acid modifications selected from I12F, L12P, I18T, A26T, G29W, T53S, M55T, M56K, M56T, N58S, S72G, M99L, L63P, L98Q, Y105L, L106I, and/or I117L, or a conservative amino acid substitution thereof. In some embodiments, the TIM is or contains a vIgD has one or more amino acid modifications selected from L12P, I18T, A26T, G29W, A31Y, T53S, M55T, M56K, N58S, S72G, M99L, L63P, L98Q, Y105L, L106E, L106I, and/or I117L, or a conservative amino acid substitution thereof. In some embodiments, the TIM is or contains a vIgD that has one or more amino acid modifications selected from A26T, G29W, L63P, S72G, L98Q, M99L, Y105L and/or L106I, or a conservative amino acid substitution thereof.

[0446] In some embodiments, the TIM is or contains a vIgD that has two or more amino acid modifications selected from among A6T, V10A, L12F, L12H, L12I, L12P, S14N, S15P, R16C, R16G, R16H, I18A, I18F, I18N, I18T, I18V, A19V, S20N, V22A, V22I, E24Q, A26D, A26S, A26T, S27P, P28L, G29R, G29W, K30R, A31Y, E33M, E33V, R35K, T37S, V38I, Q41L, A42S, A42T, A42V, D43N, Q45H, V46E, T47A, E48R, T53S, Y54F, M55R, M55T, M55V, M56K, M56L, M56R, M56T, M56V, N58D, N58S, E59D, E59G, T61A, T61I, T61N, T61R, T61S, L63H, L63P, D64E, D64N, D64V, D65G, I67N, I67T, I67V, T69A, T69I, T69S, T71A, T71I, S72G, S72T, S73R, N75D, Q76R, Q82H, Q82R, R85G, A86T, M87A, M87K, M87T, M87V, T89A, T89M, T89S, L91R, I93L, I93V, K95R, V96I, E97Q, L98Q, L98R, M99I, M99L, Y105F, Y105L, L106E, L106I, L106N, L106R, L106V, I108F, I108V, N110K, N110S, N110Y, Q113H, Y115H, Y115N, V116A, I117E, I117K, I117L, I117M, I117T, P119H, E120D, P121S, C122P, D124P, D1241, S1251, S125P, D126P, and/or D126T.

[0447] In some embodiments, the TIM is or contain a vIgD of CTLA-4 that has an amino acid substitution in an unmodified or wild-type CTLA-4 polypeptide or specific binding fragment thereof corresponding to A26T, G29W, T53S, L63P, S72G, L98Q, M99L, Y105L and/or L106I. In some embodiments, the TIM is or contains a vIgD of CTLA-4 that contains the amino acid substitutions A26T/G29W, A26T/T53S, A26T/L63P, A26T/S72G, A26T/L98Q, A26T/M99L, A26T/Y105L, A26T/L106I, A26T/G29W, G29W/T53S, G29W/L63P, G29W/S72G, G29W/L98Q, G29W/M99L, G29W/Y105L, G29W/L106I, A26T/T53S, G29W/T53S, T53S/L63P, T53S/S72G, T53S/L98Q, T53S/M99L, T53S/Y105L, or T53S/L106I, A26T/L63P, G29W/L63P, T53S/L63P, L63P/S72G, L63P/L98Q, L63P/M99L, L63P/Y105L, or L63P/L106I, A26T/S72G, G29W/S72G, T53S/S72G, L63P/S72G, S72G/L98Q, S72G/M99L, S72G/Y105L or S72G/L106I, A26T/L98Q, G29W/L98Q, T53S/L98Q, L63P/L98Q, S72G/L98Q, L98Q/M99L, L98Q/Y105L or L98Q/L106I, A26T/M99L, G29W/M99L, T53S/M99L, L63P/M99L, S72G/M99L, L98Q/M99L, M99L/Y105L, M99L/L106I, A26T/Y105L, G29W/Y105L, T53S/Y105L, L63P/Y105L, S72G/Y105L, L98Q/Y105L, M99L/Y105L, Y105L/L106I, A26T/L106I, G29W/L106I, T53S/L106IL63P/L106I, S72G/L106I, L98Q/L106I, M99L/L106I, Y105L/L106I. The variant CTLA-4 polypeptide can include further amino acid modifications (e.g. substitutions), such as any described herein, in accord with provided embodiments.

[0448] In some embodiments, the amino acid modification(s), e.g. substitutions(s) are A31Y/L106E, A6T/A26T/M55T/M99L/Y105L, V10A/G29W/T53S/M56K/L63P/L98Q/Y105L/P121S, V10A/L63P/D64V/S72G/L98Q/M99L/Y105L, V10A/L63P/L98Q/Y105L, L12F/R16H/G29W/M56T/L98Q/Y105L, L12F/A26T/L63P/L98Q/Y105L/L106R, L12F/K30R/S72G/Q82R/L98Q/M99L/Y105L, L12H/I18V/A42T/M55T/N58D/L98R/Y105L/L106I/P121S, L12H/E33M/L98Q/Y105L, L12H/M55T/E59D/L63P/M99L, L12H/L63P/S72G/L98Q/Y105L, L12I/M55T/M56V/I67T/M99L/L106R/I108F, L12P/R16H/A26T/T61S/L63P/M87V/L98Q/M99L/Y105L/L106I/I117L, L12P/I18T/A26T/M55T/T69S/S72G/M99L/Y105L, L12P/A26T, L12P/A26T/L63P, L12P/A26T/L63P/S72G/T89M/L98Q/M99L/Y105L, L12P/G29W/L63P/S72G/L98Q/Y105L, L12P/G29W/L63P/S72G/L98Q/Y105L/L106I, L12P/A26T/L63P/L98Q/M99L/Y105L, L12P/A26T/L63P/L98Q/Y105L, L12P/A26T/L63P/L98Q/Y105L/L106I, L12P/G29W/D43N/N58S/L63P/L98Q/M99L/Y105L, L12P/M56V/L63P/V96I/L98Q/M99L/Y105L/Y115H, L12P/L63P/S72G/L98Q/M99L/Y105L, L12P/L63P/S72G/L98Q/M99L/Y105L/L106N, L12P/L63P/S72G/L98Q/M99L/Y105L/L106N/I117L, S14N/R16C/I18T/M56K/T61A/L63P/A86T/M99L, S15P/I18V/M56T/L98Q/M99L/Y105L, R16C/G29W/E33V/M55T/L63P/L98Q/Y105L, I18A/L63P/S72G/L98Q/Y105L, I18F/L63P/L98Q/M99L/Y105L/P121S, I18N/A26T/L63H/T89A/L98Q/M99L/Y105L, I18N/L63P/S72T/M87T/L98Q/Y105L/N110S, I18T/A26S/M55T/M56V/L63P/S72G/L98Q/M99L/Y105L/I117K, I18T/A26T/L63P/S72G/L98Q/Y105L, I18T/A26T/L63P/Q82R/L98Q/Y105L, I18T/G29R/L63P/S72G/L98Q/M99L/Y105L, I18T/G29W/L63P/L98Q/Y105L, I18T/E48R/L63P/T69S/L98Q/Y105L/N110Y, I18T/T61R/L63P/S72G/L98Q/M99L/Y105L, I18T/L63P/S72G/M87K/L98Q/M99L/Y105L, I18T/L63P/S72G/L98Q/M99L/Y105L, I18T/L63P/S72G/L98Q/Y105L/I108V, I18V/A26T/L63P/D64E/L98Q/Y105L/L106R/N110K, I18V/G29W/L63P/S72G/L98Q/Y105L, A19V/G29W/R35K/L63P/L98Q/M99L/Y105L, S20N/A26T/L63P/L98Q/M99L/Y105L, V22A/L63P/L98Q/M99L/Y105L/P119H, V22I/L63P/L98Q/Y105L/I117M, E24Q/L63P/S72G/L98Q/M99L/Y105L, A26D/S72G/L98Q/M99L/Y105L, A26T/A42V/Q45H/I67N/M87K/E97Q/M99L, A26T/V46E/L63P/D65G/L98Q, A26T/T47A/M56K/L63P/S72G/Q82R/L98Q/M99L/Y105L, A26T/T53S/M56K/L63P/L98Q/Y105L, A26T/T53S/L63P/L98Q/Y105L/L106I/I117L, A26T/Y54F/M56K/M99L/Y105L, A26T/M55R/L98Q/M99L/Y105L, A26T/M55T/L63P/S72G/L98Q/M99L/Y105L, A26T/M55T/L63P/L98Q/M99L/Y105L, A26T/L63P/D65G/L98Q/M99L/Y105L, A26T/L63P/M87V/N110K/I117E, A26T/L63P/S72G/L98Q/M99L/Y105L, A26T/L63P/S72G/L98Q/Y105L/L106I/I117L, A26T/L63P/L98Q/M99L/Y105L, A26T/I67N/S72G/L98Q/M99L/Y105L, S27P/M56K/L63P/S72G/S73R/T89A/M99L/Y105L/I117M, P28L/E33V/L63P/S72G/L98Q/M99L/Y105L, P28L/E33V/L63P/S72G/L98R/M99L/Y105L, G29W/T53S/M56K/N58S/L63P/M87V/L98Q/Y105L, G29W/T53S/M56K/N58S/L63P/M87V/L98Q/Y105L/I108V, G29W/T53S/M56K/N58S/L63P/M87V/L98Q/Y105L/P121S, G29W/T53S/M56K/T61N/L63P/L98Q/Y105L, G29W/T53S/M56K/L63P/Q82H/L98Q/M99I/Y105L, G29W/T53S/M56K/L63P/L98Q/Y105L, G29W/T53S/L63P/S72G/L98Q/Y105L, G29W/M55V/E59G/L63P/L98Q/Y105L, G29W/M56T/L63P/L98Q/Y105L/L106I/I117L, G29W/N58D/I67V/L98Q/M99L/Y105L, G29W/N58S/L63P/D64N/L98Q/M99L/Y105L, G29W/N58S/L63P/T69I/L98Q/M99L/Y105L, G29W/N58S/L63P/S72G/L98Q/Y105L, G29W/N58S/L63P/S72G/L98Q/Y105L/L106I, G29W/N58S/L63P/S72G/L98Q/Y105L/L106V, G29W/N58S/L63P/S72G/M87V/L98Q/Y105L, G29W/N58S/L63P/Q82R/L98Q/Y105L, G29W/N58S/L63P/M87T/L98Q/M99L/Y105L, G29W/N58S/L63P/L98Q/Y105L, G29W/E59G/L63P/L98Q/Y105L, G29W/T61I/L63P/S72G/L98Q/M99L/Y105L, G29W/L63P/D65G/S72G/L98Q/Y105L, G29W/L63P/I67V/S72G/L98Q/Y105L, G29W/L63P/S72G/L98Q/Y105L/L106I, G29W/L63P/S72G/L98Q/Y105L/L106I/I117L, G29W/L63P/S72G/L98Q/Y105L/I117L, G29W/L63P/S72G/L98Q/Y105L/P121S, G29W/L63P/L98Q/M99L/Y105L, G29W/S72G/Q76R/L98Q/Y105L/L106I/Q113H, G29W/M87K/T89S/L98Q/M99L/Y105L/I108V/I117L, G29W/M87K/I93V/L98Q/M99L/Y105L, G29W/L98Q/M99L/Y105L, E33M/A42T/L98Q/Y105L, E33M/L63P/S72G/L98Q/Y105L, E33M/L63P/S72G/L98Q/Y105L/I108F, E33M/L63P/S72G/L98Q/Y105L/I117L, E33M/Q82H/L98Q/M99L/Y105L, E33V/A42S/M55T/L98Q/M99L/Y105L, T37S/M56V/L98Q/Y105L, V38I/L63P/S72G/L98Q/M99L/Y105L, Q41L/Y54F/M56K/M99L/I108F, T53S/M56V/L98Q/Y105L, M55T/L63P/T71I/M99L/Y105L, M55T/S72G/L98Q/M99L/Y105L, M55T/E97Q/M99L/Y105F, M56K/L63P/N75D/V96I/M99L/Y105L/L106I, M56L/L63P/L98Q/Y105L/L106I/I117L, M56R/L63P/L98Q/M99L/Y105L, M56T/L91R/L98Q/Y105L, M56V/E59G/L63P/S72G/M87K/I93V/L98Q/M99L/Y105L/I117E, T61A/L63P/S72G/L98Q/M99L/Y105L, L63P/T69A/L98Q/M99L/Y105L/L106R/V116A, L63P/S72G/M87A/L98Q/Y105L, L63P/S72G/I93L/L98Q/M99L/Y105L, L63P/S72G/L98Q/M99L/Y105L, L63P/S72G/L98Q/M99L/Y105L/L106I/I117L, L63P/S72G/L98Q/Y105L, L63P/S72G/L98Q/Y105L/L106I/I117L, L63P/S72G/Y105L, L63P/M87K/M99L/L106R, L63P/Q82H/L98Q/M99L/Y105L, L63P/K95R, L63P/L98Q, L63P/L98Q/M99L/Y105L, L63P/L98Q/M99L/Y105L/L106I, L63P/L98Q/M99L/Y105L/I108V, L63P/L98Q/M99L/Y105L/I117M, L63P/L98Q/Y105L, L63P/L98Q/V116A, L63P/L98R/N110K, L63P/M99L/Y105L/I108F, I67V/S72G/Q82H/T89A/L98Q/M99L/Y105L, S72G/R85G/L98Q/M99L/Y105L/L106I, S72G/L98Q/M99L/Y105L/I117T, L98Q/M99L/Y105L, L98Q/M99L/Y105L/L106I/I117T, L98Q/M99L/Y105L/L106I/Y115N, L98Q/Y105L, and L98R/N110K.

[0449] In some embodiments, the TIM is or contains a vIgD of CTLA-4 that additionally includes the amino acid modifications C122S with reference to positions set forth in SEQ ID NO:1 or 2.

[0450] In some embodiments, the TIM is or contains a vIgD of CTLA-4 that includes the amino acid modifications C122S with reference to positions set forth in SEQ ID NO:1 or 2. In some embodiments, the TIM has the sequence of amino acids set forth in SEQ ID NO: 668.

[0451] In some embodiments, the TIM is or contains an IgD (e.g. IgV) of wild-type CTLA-4 set forth in Table 3 or a vIgD thereof comprising any of the modifications (e.g. substitutions) listed in Table 3. Table 3 also provides exemplary sequences by reference to SEQ ID NO for the extracellular domain (ECD) or IgV domain of CTLA-4. As indicated, the exact locus or residues corresponding to a given domain can vary, such as depending on the methods used to identify or classify the domain. Also, in some cases, adjacent N- and/or C-terminal amino acids of a given domain (e.g. IgV) also can be included in a sequence of an TIM, such as to ensure proper folding of the domain when expressed. Thus, it is understood that the exemplification of the SEQ ID NOS in Table 3 is not to be construed as limiting. For example, the particular domain, such as the IgV domain, of a variant CTLA-4 polypeptide can be several amino acids longer or shorter, such as 1-10, e.g. 1, 2, 3, 4, 5, 6 or 7 amino acids longer or shorter, than the sequence of amino acids set forth in the respective SEQ ID NO.

[0452] In some embodiments, the TIM is or contains a variant CTLA-4 ECD set forth in any one of SEQ ID NOS: 3-190. In some embodiments, the TIM is or contains a sequence that exhibits at least 90% identity, at least 91% identity, at least 92% identity, at least 93% identity, at least 94% identity, at least 95% identity, such as at least 96% identity, 97% identity, 98% identity, or 99% identity to any one of SEQ ID NOS: 3-190 and contains the amino acid modification(s), e.g. substitution(s) not present in the wild-type or unmodified CTLA-4, e.g. not present in SEQ ID NO:1 or 2. In some embodiments, the TIM is or contains a specific binding fragment of any of the ECD sequences set forth in any one of SEQ ID NOS: 3-190 and that contains the amino acid modification(s), e.g. substitution(s) not present in the wild-type or unmodified CTLA-4, e.g. not present in SEQ ID NO:1 or 2.

[0453] In some embodiments, the TIM is or contains a variant IgV sequence set forth in any one of SEQ ID NOS: 192-355. In some embodiments, the TIM is or contains a sequence that exhibits at least 90% identity, at least 91% identity, at least 92% identity, at least 93% identity, at least 94% identity, at least 95% identity, such as at least 96% identity, 97% identity, 98% identity, or 99% identity to any of the IgV sequences set forth in any one of SEQ ID NOS: 192-355 and contains the amino acid modification(s), e.g., substitution(s), not present in the wild-type or unmodified CTLA-4, e.g. not present in SEQ ID NO:191. In some embodiments, the TIM is a specific binding fragment of any of the IgV sequences set forth in any one of SEQ ID NOS: 192-355 and that contains the amino acid modification(s), e.g. substitution(s) not present in the wild-type or unmodified CTLA-4, e.g. set forth in SEQ ID NO:191.

[0454] In some embodiments, the TIM is a variant CTLA-4 polypeptide that comprises the sequence set forth in SEQ ID NO:92. In some embodiments, the TIM is a variant CTLA-4 polypeptide that consists essentially of the sequence set forth in SEQ ID NO:92. In some embodiments, the TIM is a variant CTLA-4 polypeptide that consists of the sequence set forth in SEQ ID NO:92.

[0455] In some embodiments, the TIM is a variant CTLA-4 polypeptide that comprises the sequence set forth in SEQ ID NO: 113. In some embodiments, the TIM is a variant CTLA-4 polypeptide that consists essentially of the sequence set forth in SEQ ID NO: 113. In some embodiments, the TIM is a variant CTLA-4 polypeptide that consists of the sequence set forth in SEQ ID NO: 113.

[0456] In some embodiments, the TIM is a variant CTLA-4 polypeptide that comprises the sequence set forth in SEQ ID NO: 165. In some embodiments, the TIM is a variant CTLA-4 polypeptide that consists essentially of the sequence set forth in SEQ ID NO: 165. In some embodiments, the TIM is a variant CTLA-4 polypeptide that consists of the sequence set forth in SEQ ID NO: 165.

[0457] In some embodiments, the TIM is a variant CTLA-4 polypeptide that comprises the sequence set forth in SEQ ID NO: 186. In some embodiments, the TIM is a variant CTLA-4 polypeptide that consists essentially of the sequence set forth in SEQ ID NO: 186. In some embodiments, the TIM is a variant CTLA-4 polypeptide that consists of the sequence set forth in SEQ ID NO: 186.

TABLE 3
Exemplary variant CTLA-4 TIMs containing an IgD or vIgD

| | | IgV |
|---|---|---|
| | ECD | SEQ |
| | SEQ | ID |
| Mutation(s) | ID NO | NO |
| Wild-type | 1, 2 | 191 |
| C122S | 668 | |
| L12P/A26T/L63P/L98Q/Y105L | 3 | 192 |
| L63P/L98R/N110K | 4 | 193 |
| L12P/A26T | 5 | 194 |
| L12P/A26T/L63P | 6 | 195 |
| L63P/L98Q/Y105L | 7 | 196 |
| L98Q/Y105L | 8 | 197 |
| L63P | 9 | 198 |
| L98R/N110K | 10 | 199 |
| L12P/A26T/L63P/L98Q/M99L/Y105L | 11 | 200 |
| E33M/Q82H/L98Q/M99L/Y105L | 12 | 201 |
| L63P/S72G/L98Q/M99L/Y105L | 13 | 202 |
| S14N/R16C/I18T/M56K/T61A/L63P/A86T/M99L | 14 | 203 |
| S27P/M56K/L63P/S72G/S73R/T89A/M99L/Y105L/I117M | 15 | 204 |
| M56K/L63P/N75D/V96I/M99L/Y105L/L106I | 16 | 205 |
| L63P/S72G/Y105L | 17 | 206 |
| L63P/L98Q/M99L/Y105L/I117M | 18 | 207 |
| L63P/S72G/L98Q/M99L/Y105L/L106I/I117L | 19 | 202 |
| A26T/L63P/S72G/L98Q/Y105L/L106I/I117L | 20 | 208 |
| L63P/L98Q/V116A | 21 | 209 |
| G29W/L98Q/M99L/Y105L | 22 | 210 |
| T37S/M56V/L98Q/Y105L | 23 | 211 |
| A26T/Y54F/M56K/M99L/Y105L | 24 | 212 |
| L12P/I18T/A26T/M55T/T69S/S72G/M99L/Y105L | 25 | 213 |
| V22I/L63P/L98Q/Y105L/I117M | 26 | 214 |
| A26T/L63P/S72G/L98Q/M99L/Y105L | 27 | 215 |
| E33M/A42T/L98Q/Y105L | 28 | 216 |
| M55T/E97Q/M99L/Y105F | 29 | 217 |
| M55T/S72G/L98Q/M99L/Y105L | 30 | 218 |
| R16C/G29W/E33V/M55T/L63P/L98Q/Y105L | 31 | 219 |
| L12P/A26T/L63P/L98Q/Y105L/L106I | 32 | 192 |
| M56L/L63P/L98Q/Y105L/L106I/I117L | 33 | 220 |
| S15P/I18V/M56T/L98Q/M99L/Y105L | 34 | 221 |
| I18T/G29W/L63P/L98Q/Y105L | 35 | 222 |
| L63P/Q82H/L98Q/M99L/Y105L | 36 | 223 |
| L98Q/M99L/Y105L/L106I/I117T | 37 | 224 |
| L98Q/M99L/Y105L/L106I/Y115N | 38 | 224 |
| M55T/L63P/T71I/M99L/Y105L | 39 | 225 |
| A26T/T53S/M56K/L63P/L98Q/Y105L | 40 | 226 |
| I18T/A26T/L63P/Q82R/L98Q/Y105L | 41 | 227 |
| L12H/M55T/E59D/L63P/M99L | 42 | 228 |
| I18T/L63P/S72G/L98Q/Y105L/I108V | 43 | 229 |
| I18T/L63P/S72G/L98Q/M99L/Y105L | 44 | 230 |
| T61A/L63P/S72G/L98Q/M99L/Y105L | 45 | 231 |
| V38I/L63P/S72G/L98Q/M99L/Y105L | 46 | 232 |
| L63P/S72G/I93L/L98Q/M99L/Y105L | 47 | 233 |
| L12I/M55T/M56V/I67T/M99L/L106R/I108F | 48 | 234 |
| I18N/A26T/L63H/T89A/L98Q/M99L/Y105L | 49 | 235 |
| I18T/E48R/L63P/T69S/L98Q/Y105L/N110Y | 50 | 236 |
| I18N/L63P/S72T/M87T/L98Q/Y105L/N110S | 51 | 237 |
| G29W/M56T/L63P/L98Q/Y105L/L106I/I117L | 52 | 238 |
| G29W/N58S/L63P/M87T/L98Q/M99L/Y105L | 53 | 239 |
| G29W/N58S/L63P/D64N/L98Q/M99L/Y105L | 54 | 240 |
| I18T/L63P/S72G/M87K/L98Q/M99L/Y105L | 55 | 241 |
| M56V | 56 | 242 |
| L63P/K95R | 57 | 243 |
| L63P/L98Q | 58 | 209 |
| L98Q/M99L/Y105L | 59 | 224 |
| L63P/M87K/M99L/L106R | 60 | 244 |
| L63P/M99L/Y105L/I108F | 61 | 245 |
| V10A/L63P/L98Q/Y105L | 62 | 246 |
| M56T/L91R/L98Q/Y105L | 63 | 247 |
| A26T/L63P/M87V/N110K/I117E | 64 | 248 |
| G29W/L63P/L98Q/M99L/Y105L | 65 | 249 |
| A26T/V46E/L63P/D65G/L98Q | 66 | 250 |
| G29W/N58S/L63P/L98Q/Y105L | 67 | 251 |
| G29W/E59G/L63P/L98Q/Y105L | 68 | 252 |
| L12H/L63P/S72G/L98Q/Y105L | 69 | 253 |
| A6T/A26T/M55T/M99L/Y105L | 70 | 254 |
| A26T/L63P/D65G/L98Q/M99L/Y105L | 71 | 255 |
| V10A/L63P/D64V/S72G/L98Q/M99L/Y105L | 72 | 256 |
| L12P/G29W/D43N/N58S/L63P/L98Q/M99L/Y105L | 73 | 257 |
| I18V/A26T/L63P/D64E/L98Q/Y105L/L106R/N110K | 74 | 258 |
| A19V/G29W/R35K/L63P/L98Q/M99L/Y105L | 75 | 259 |
| L12P/A26T/L63P/S72G/T89M/L98Q/M99L/Y105L | 76 | 260 |
| P28L/E33V/L63P/S72G/L98R/M99L/Y105L | 77 | 261 |
| E24Q/L63P/S72G/L98Q/M99L/Y105L | 78 | 262 |
| I18T/G29R/L63P/S72G/L98Q/M99L/Y105L | 79 | 263 |
| L63P/L98Q/M99L/Y105L | 80 | 207 |
| Q41L/Y54F/M56K/M99L/I108F | 81 | 264 |
| S72G/L98Q/M99L/Y105L/I117T | 82 | 265 |
| M56R/L63P/L98Q/M99L/Y105L | 83 | 266 |
| E33M/L63P/S72G/L98Q/Y105L | 84 | 267 |
| L63P/L98Q/M99L/Y105L/L106i | 85 | 207 |
| A26T/M55R/L98Q/M99L/Y105L | 86 | 268 |
| L63P/S72G/M87A/L98Q/Y105L | 87 | 269 |
| A26D/S72G/L98Q/M99L/Y105L | 88 | 270 |
| V22A/L63P/L98Q/M99L/Y105L/P119H | 89 | 271 |
| A26T/M55T/L63P/L98Q/M99L/Y105L | 90 | 272 |
| E33V/A42S/M55T/L98Q/M99L/Y105L | 91 | 273 |
| G29W/N58S/L63P/Q82R/L98Q/Y105L | 92 | 274 |
| E33M/L63P/S72G/L98Q/Y105L/I117L | 93 | 267 |
| A26T/I67N/S72G/L98Q/M99L/Y105L | 94 | 275 |
| L12F/A26T/L63P/L98Q/Y105L/L106R | 95 | 276 |
| S20N/A26T/L63P/L98Q/M99L/Y105L | 96 | 277 |
| G29W/T61I/L63P/S72G/L98Q/M99L/Y105L | 97 | 278 |
| G29W/N58S/L63P/T69I/L98Q/M99L/Y105L | 98 | 279 |
| L12P/L63P/S72G/L98Q/M99L/Y105L/L106N | 99 | 280 |
| L63P/T69A/L98Q/M99L/Y105L/L106R/V116A | 100 | 281 |
| G29W/N58S/L63P/S72G/L98Q/Y105L | 101 | 282 |
| G29W/L63P/D65G/S72G/L98Q/Y105L | 102 | 283 |
| T53S/M56V/L98Q/Y105L | 103 | 284 |
| L63P/S72G/L98Q/Y105L | 104 | 285 |
| I18A/L63P/S72G/L98Q/Y105L | 105 | 286 |
| G29W/T53S/M56K/L63P/L98Q/Y105L | 106 | 287 |
| I18V/G29W/L63P/S72G/L98Q/Y105L | 107 | 288 |
| G29W/L63P/S72G/L98Q/Y105L/L106I | 108 | 289 |
| G29W/L63P/I67V/S72G/L98Q/Y105L | 109 | 290 |
| G29W/M55V/E59G/L63P/L98Q/Y105L | 110 | 291 |
| G29W/L63P/S72G/L98Q/Y105L/I117L | ill | 289 |
| L63P/S72G/L98Q/Y105L/L106I/I117L | 112 | 285 |
| L12F/R16H/G29W/M56T/L98Q/Y105L | 113 | 292 |
| L12P/G29W/L63P/S72G/L98Q/Y105L | 114 | 293 |
| L12P/G29W/L63P/S72G/L98Q/Y105L/L106I | 115 | 293 |
| G29W/L63P/S72G/L98Q/Y105L/L106I/I117L | 116 | 289 |
| G29W/N58S/L63P/S72G/L98Q/Y105L/L106I | 117 | 283 |
| A26T/T53S/L63P/L98Q/Y105L/L106I/I117L | 118 | 294 |
| G29W/N58S/L63P/S72G/M87V/L98Q/Y105L | 119 | 295 |
| G29W/S72G/Q76R/L98Q/Y105L/L106I/Q113H | 120 | 296 |
| G29W/N58S/L63P/S72G/L98Q/Y105L/L106V | 121 | 283 |
| A26T/L63P/L98Q/M99L/Y105L | 122 | 297 |
| G29W/N58D/I67V/L98Q/M99L/Y105L | 123 | 298 |
| I67V/S72G/Q82H/T89A/L98Q/M99L/Y105L | 124 | 299 |
| S72G/R85G/L98Q/M99L/Y105L/L106I | 125 | 300 |
| A26T/T47A/M56K/L63P/S72G/Q82R/L98Q/M99L/Y105L | 126 | 301 |
| A26T/M55T/L63P/S72G/L98Q/M99L/Y105L | 127 | 302 |
| L12H/I18V/A42T/M55T/N58D/L98R/Y105L/L106I/P121S | 128 | 303 |
| I18T/A26T/L63P/S72G/L98Q/Y105L | 129 | 304 |
| L12F/K30R/S72G/Q82R/L98Q/M99L/Y105L | 130 | 305 |
| L12P/L63P/S72G/L98Q/M99L/Y105L/L106N/I117L | 131 | 316 |
| G29W/M87K/I93V/L98Q/M99L/Y105L | 132 | 306 |
| P28L/E33V/L63P/S72G/L98Q/M99L/Y105L | 133 | 307 |
| G29W/T53S/M56K/L63P/Q82H/L98Q/M99I/Y105L | 134 | 308 |
| I18F/L63P/L98Q/M99L/Y105L/P121S | 135 | 309 |
| L63P/L98Q/M99L/Y105L/I108V | 136 | 207 |
| A26T/A42V/Q45H/I67N/M87K/E97Q/M99L | 137 | 310 |
| M56V/E59G/L63P/S72G/M87K/I93V/L98Q/M99L/Y105L/I117E | 138 | 311 |
| G29W/M87K/T89S/L98Q/M99L/Y105L/I108V/I117L | 139 | 278 |
| L12P/M56V/L63P/V96I/L98Q/M99L/Y105L/Y115H | 140 | 312 |
| G29W/T53S/M56K/T61N/L63P/L98Q/Y105L | 141 | 313 |
| I18T/A26S/M55T/M56V/L63P/S72G/L98Q/M99L/Y105L/I117K | 142 | 314 |
| I18T/T61R/L63P/S72G/L98Q/M99L/Y105L | 143 | 315 |
| L12P/L63P/S72G/L98Q/M99L/Y105L | 144 | 316 |
| E33M/L63P/S72G/L98Q/Y105L/I108F | 145 | 267 |
| L12P/R16H/A26T/T61S/L63P/M87V/L98Q/M99L/Y105L/L106I/I117L | 146 | 317 |
| G29W/T53S/M56K/N58S/L63P/M87V/L98Q/Y105L/P121S | 147 | 318 |
| G29W/L63P/S72G/L98Q/Y105L/P121S | 148 | 289 |
| G29W/T53S/M56K/N58S/L63P/M87V/L98Q/Y105L | 149 | 318 |
| G29W/T53S/M56K/N58S/L63P/M87V/L98Q/Y105L/I108V | 150 | 318 |
| G29W/T53S/L63P/S72G/L98Q/Y105L | 151 | 319 |
| V10A/G29W/T53S/M56K/L63P/L98Q/Y105L/P121S | 152 | 320 |
| A31Y/L106E | 153, | 321 |
| A31Y/L106E/C122S | 155, | 321 |
| T89A/L98Q/M99L/Y105L/L106I/Y115N/E120D/C122P/D124P/S125I/D126P | 157 | 322 |
| N58S/L63P/T71A/S72G/L98Q/M99L/Y105L/D124I/S125P/D126T | 158 | 323 |
| R16G/E33M/N58S/E59G/L63P/L98Q/Y105L/E120D/C122P/D124P/S125I/ | 159 | 324 |
| D126P | | |
| G29W/L63P/S72G/L98Q/Y105L/P121S/D126T | 160 | 325 |
| L12H/E33M/L98Q/Y105L | 161 | 326 |
| T53S/M56K/N58S/L63P/M87V/L98Q/Y105L | 162 | 327 |
| I18T/A26T/M55T/M56K/L63P/L98Q/M99L/Y105L | 163 | 328 |
| I18T/A26T/M56K/L63P/L98Q/Y105L | 164 | 329 |
| T53S/L63P/L98Q | 165 | 330 |
| T53S/L63P/Y105L | 166 | 331 |
| T53S/M56K/N58S/L63P/M87V/L98Q | 167 | 332 |
| T53S/M56K/N58S/L63P/M87V/Y105L | 168 | 333 |
| T53S/M56K/N58S/L63P/L98Q/Y105L | 169 | 334 |
| T53S/M56K/N58S/M87V/L98Q/Y105L | 170 | 335 |
| T53S/M56K/L63P/M87V/L98Q/Y105L | 171 | 336 |
| T53S/N58S/L63P/M87V/L98Q/Y105L | 172 | 337 |
| M56K/N58S/L63P/M87V/L98Q/Y105L | 173 | 338 |
| E33V/L98Q/Y105L | 174 | 339 |
| E33V/M99L/Y105L | 175 | 340 |
| E33V/L98Q/M99L | 176 | 341 |
| E33V/M99L | 177 | 342 |
| L12F/R16H/G29W/M56T/L98Q | 178 | 343 |
| L12F/R16H/G29W/M56T/Y105L | 179 | 344 |
| L12F/R16H/G29W/L98Q/Y105L | 180 | 345 |
| L12F/R16H/M56T/L98Q/Y105L | 181 | 346 |
| G29W/M56T/L98Q/Y105L | 182 | 347 |
| L12F/G29W/L98Q/Y105L | 183 | 348 |
| L12F/L98Q/Y105L | 184 | 349 |
| R16H/L98Q/Y105L | 185 | 350 |
| G29W/L98Q/Y105L | 186 | 351 |
| M56T/L98Q/Y105L | 187 | 352 |
| L12F/R16H/G29W/M56T/S72G/L98Q/Y105L | 188 | 353 |
| G29W/M56T/S72G/L98Q/Y105L | 189 | 354 |
| I18T/T61R/L63P/S72G/L98Q/M99L/P102L/Y105L | 190 | 355 |

[0458] C. Formats

[0459] The multi-domain immunomodulatory proteins containing one or more BIM and one or more TIM provided herein can be formatted in a variety of ways, including as a single chain polypeptide fusion or as a multimeric (e.g. dimeric, trimeric, tetrameric, or pentameric) molecules. The particular format is chosen such that the BIM of the immunomodulatory protein specifically binds to a ligand of a B cell stimulatory receptor and the TIM specifically binds to a T cell stimulatory receptor or a ligand of a T cell stimulatory receptor. In some aspects, the particular format is chosen to effect attenuation of an activity of the T cell stimulatory receptor and the B cell stimulatory receptor, such as to reduce or decrease an immune response mediated by T cells and B cells, respectively. In some embodiments, the modular format of the provided immunomodulatory proteins provides flexibility for engineering or generating immunomodulatory proteins for modulating activity at an immune synapse involving interactions between a B cell stimulatory receptor and a T cell stimulatory receptor and their ligands.

[0460] In some embodiments, the format of the multi-domain immunomodulatory protein is chosen to avoid crosslinking or engagement of the T cell stimulatory receptor. Thus, in some aspects, the provided immunomodulatory proteins do not exhibit multivalent binding to the T cell stimulatory receptor. For example, for the immunomodulatory proteins generated in which the TIM binds to a T cell stimulatory receptor, e.g. CD28, a relatively smaller molecular weight, monomeric and/or single chain polypeptide fusion of the immunomodulatory protein is contemplated.

[0461] In some embodiments, the provided multi-domain immunomodulatory proteins can include one or more BIM and one or more TIM. In some embodiments, an immunomodulatory protein can include one or more BIM described herein and any one or more TIM described herein. In some embodiments, the immunomodulatory protein comprises exactly 1, 2, 3, 4, 5 BIMs, which, in some aspects, are the same or are of identical sequence when a plurality are included. In some embodiments, each of a plurality of, e.g. 2, 3, 4, or 5, are linked directly or indirectly via a linker to another BIM. In some embodiments, the immunomodulatory proteins comprises exactly 1, 2, 3, 4, 5 TIMs, which, in some aspects, are the same or are of identical sequence when a plurality are included. In some embodiments, each of a plurality of TIMs, e.g. 2, 3, 4, or 5, are linked directly or indirectly via a linker to another TIM.

[0462] In some embodiments, the multi-domain immunomodulatory protein contains a polypeptide that includes at least one BIM and at least one TIM. In some aspects, at least one of the one or more BIM molecules are linked directly or indirectly via a linker to at least one of the one or more TIM. In some embodiments, the immunomodulatory protein includes a polypeptide containing a BIM linked directly or indirectly via a linker to a TIM, in either order. In some embodiments, at least one BIM is amino terminal to at least one TIM in the polypeptide. In some embodiments, at least one BIM is carboxy terminal to at least one TIM in the polypeptide.

[0463] In addition to single polypeptide chain embodiments, in some embodiments two, three, four, or more of a polypeptides containing one or more BIM and/or one or more BIM can be covalently or non-covalently attached to each other. In some embodiments, at least one polypeptide chain contains one or more BIM and at least one polypeptide chain contains one or more TIM. In some embodiments, each of at least two polypeptide chain contains at least one BIM and at least one TIM. Thus, monomeric, dimeric, and higher order (e.g., 3, 4, 5, or more) multimeric proteins are provided herein. For example, in some embodiments exactly two polypeptides, each containing one or more BIM and/or one or more TIM, can be covalently or non-covalently attached to each other to form a dimer. In some embodiments, the two polypeptides can be attached via a multimerization domain, in which, in some aspects, one or both of the BIM and TIM are linked directly or indirectly via a linker to the multimerization domain. In such embodiments, the multimerization domain can be the same or different. In some embodiments, the multimerization domain, such as an Fc region, facilitates attachment of two polypeptide chains via interchain cysteine disulfide bond. Compositions comprising two or more polypeptides can be of an identical sequence or substantially identical sequence of polypeptide (e.g., a homodimer) or of a non-identical sequence of polypeptides (e.g., a heterodimer).

[0464] In some embodiments, the multi-domain immunomodulatory protein can further include a tag or moiety.

[0465] Non-limiting examples of components for inclusion in provided formats are further described in the following subsections. Exemplary Fc-fusion formats of provided multi-domain immunomodulatory proteins are depicted in FIG. 16.

[0466] 1. Linkers

[0467] For the multi-domain immunomodulatory proteins provided herein, linkers (interchangeably used with the term spacers) can be used to connect components of a polypeptide, such as any BIM and/or TIM provided herein. In some cases, a linker is a peptide or polypeptide sequence {e.g. a synthetic peptide or polypeptide sequence), or is a non-peptide linker able to connect two moieties. In some aspects, a linker is used or chosen to maintain the structural flexibility and other conformational characteristics of the individual residues or at the secondary, tertiary, or quaternary structural levels of domains of the polypeptide fusion protein, such as in order to maintain functional properties of the immunomodulatory protein. Linkers can also provide additional beneficial properties to the protein, such as increased protein expression in mammalian expression systems, improved biophysical properties such as stability and solubility, improved protein purification and detection and/or increased enzymatic activity. In some examples, two or more linkers can be linked in tandem.

[0468] In some aspects, the linkers can be peptide linker. In other aspects, the linker includes chemical linking agents and heterobifunctional linking agents. In some cases, the linker is not cleavable. In other cases, a linker can contain one or more protease-cleavable sites, which can be located within the sequence of the linker or flanking the linker at either end of the linker sequence.

[0469] When multiple linkers are present in the immunomodulatory protein between BIM, TIM or other moieties, each of the linkers can be the same or different. Generally, linkers or multiple linkers provide flexibility to the polypeptide molecule.

[0470] In some embodiments, one or more “peptide linkers” link the BIM, TIM, or other moieties of the immunomodulatory protein. In some embodiments, a peptide linker can be a single amino acid residue or greater in length. In some embodiments, the peptide linker has at least one amino acid residue but is no more than 20, 19, 18, 17, 16, 15, 14, 13, 12, 11, 10, 9, 8, 7, 6, 5, 4, 3, 2, or 1 amino acid residues in length. In some embodiments, the linker is a flexible linker. Linking moieties are described, for example, in Huston et al. (1988) PNAS 85:5879-5883, Whitlow et al. (1993) Protein Engineering 6:989-995, and Newton et al, (1996) Biochemistry 35:545-553. Other suitable peptide linkers include any of those described in U.S. Pat. Nos. 4,751,180 or 4,935,233.

[0471] In some examples, a peptide linker includes peptides (or polypeptides) {e.g., natural, or non-naturally occurring peptides) which includes an amino acid sequence that links or genetically fuses a first linear sequence of amino acids to a second linear sequence of amino acids to which it is not naturally linked or genetically fused in nature. For example, the peptide linker can include non-naturally occurring polypeptides which are modified forms of naturally occurring polypeptides (e.g., that includes a mutation such as an addition, substitution or deletion). In another example, the peptide linker can include non-naturally occurring amino acids. In another example, the peptide linker can include naturally occurring amino acids occurring in a linear sequence that does not occur in nature. In still another example, the peptide linker can include a naturally occurring polypeptide sequence. Linking moieties can also include derivatives and analogs of the naturally occurring amino acids, as well as various non-naturally occurring amino acids (D- or L-), hydrophobic or non-hydrophobic, known in the art.

[0472] Exemplary peptide linkers are linkers with the formula Ser(Gly₄Ser)ₙ (or (Gly-Ser)ₙ residues with some Glu or Lys residues dispersed throughout to increase solubility, where n can be an integer from 1 to 20, such as 1, 2, 3, 4, 5, 6, 7, 8, 9, 10, 11, 12, 13, 14, 15, 16, 17, 18, 19, or 20. Other exemplary linkers include peptide linkers with the formula [(Gly)ₓ-Ser_{y}]_{z} where x is from 1 to 4, y is 0 or 1, and z is from 1 to 50. In other examples, the peptide linker includes the sequence G., where n can be an integer from 1 to 100. In another example, the sequence of the peptide linker can be (GA). or (GGS)ₙ.

[0473] In some embodiments, the linker is (in one-letter amino acid code): GGGGS (“4GS”; SEQ ID NO: 593) or multimers of the 4GS linker, such as repeats of 2, 3, 4, or 5 4GS linkers. In some embodiments, the peptide linker is the peptide linker is (GGGGS)₂ (SEQ ID NO: 594), (GGGGS)₃ (SEQ ID NO: 595), (GGGGS)₄ (SEQ ID NO: 600) or (GGGGS)₅ (SEQ ID NO: 671). In some embodiments, the linker also can include a series of alanine residues alone or in addition to another peptide linker (such as a 4GS linker or multimer thereof). In some embodiments, the number of alanine residues in each series is: 2, 3, 4, 5, or 6 alanines. In some embodiments, the linker is a rigid linker. For example, the linker is an α-helical linker. In some embodiments, the linker is (in one-letter amino acid code): EAAAK (SEQ ID NO:711) or multimers of the EAAAK linker, such as repeats of 2, 3, 4, 5 or 6 EAAAK linkers, such as set forth in SEQ ID NO: 712 (2×EAAAK), SEQ ID NO: 713 (3×EAAAK), SEQ ID NO: 714 (4×EAAAK), SEQ ID NO: 715 (5×EAAAK), or SEQ ID NO: 665 (6×EAAAK). In some embodiments, the linker can further include amino acids introduced by cloning and/or from a restriction site, for example the linker can include the amino acids GS (in one-letter amino acid code) as introduced by use of the restriction site BAMHI. In some embodiments, the linker (in one-letter amino acid code) is GSGGGGS (SEQ ID NO: 590) or GGGGSSA (SEQ ID NO: 596). In some examples, the linker is a 2×GGGGS followed by three alanines (GGGGSGGGGSAAA; SEQ ID NO:721).

[0474] In some embodiments, a polynucleotide encoding a desired peptide linker can be inserted between, and in the same reading frame as a polynucleotide encoding any TIM, BIM or other moiety in the provided immunomodulatory protein and between another moiety, using any suitable conventional technique.

[0475] 2. Mutimerization Domain

[0476] In some embodiments, the immunomodulatory protein containing one or more BIM(s) and/or TIM(s) is multimeric, such as dimeric, trimeric, tetrameric, or pentameric. For the dimeric format, the immunomodulatory protein comprises a first polypeptide and a second polypeptide. In some embodiments, the first and/or second polypeptide is or contains a BIM, TIM, or both. In aspects, the BIM and/or TIM is linked, directly or indirectly via a linker, to a multimerization domain. In some aspects, the mutlimerization domain increase half-life of the molecule. The linker can include any as described above.

[0477] In one example, the immunomodulatory protein provided herein is a dimer. In some cases, the immunomodulatory protein is a homodimer that contains a first and second polypeptide subunit that are the same, i.e. each has the same amino acid sequence containing the identical BIM(s) and TIM(s). The homodimer can be formed by transforming a nucleic acid molecule encoding the variant polypeptide into a cell, which, upon secretion, results in covalent or non-covalent interaction between residues of polypeptide subunits to mediate formation of the dimer.

[0478] In another example, the immunomodulatory protein is a heterodimer that contains a first and second polypeptide subunit that are different. In such an example, one or both of the first or second polypeptide subunit contains a sequence of amino acids of a BIM and TIM. In some cases, both the first and second polypeptide subunit can contain a sequence of amino acids of a BIM and a sequence of amino acids of a TIM. The heterodimer can be formed by transforming into a cell both a first nucleic acid molecule encoding a first polypeptide subunit and a second nucleic acid molecule encoding a second different polypeptide subunit. In some aspects, the heterodimer is produced upon expression and secretion from a cell as a result of covalent or non-covalent interaction between residues of the two polypeptide subunits to mediate formation of the dimer. In such processes, generally a mixture of dimeric molecules is formed, including homodimers and heterodimers. For the generation of heterodimers, additional steps for purification can be necessary. For example, the first and second polypeptide can be engineered to include a tag with metal chelates or other epitope, where the tags are different. The tagged domains can be used for rapid purification by metal-chelate chromatography, and/or by antibodies, to allow for detection by western blots, immunoprecipitation, or activity depletion/blocking in bioassays.

[0479] Interaction of two or more polypeptides of the immunomodulatory proteins can be facilitated by their linkage, either directly or indirectly, to any moiety or other polypeptide that are themselves able to interact to form a stable structure. For example, separate encoded polypeptide chains can be joined by multimerization, whereby multimerization of the polypeptides is mediated by a multimerization domain. Typically, the multimerization domain provides for the formation of a stable protein-protein interaction between a first polypeptide and a second polypeptide.

[0480] In some embodiments, the two or more individual polypeptides of the immunomodulatory proteins can be joined by multimerization, such as joined as dimeric, trimeric, tetrameric, or pentameric molecules. In some cases, the individual polypeptides are the same. For example, a trimeric molecule can be formed from three copies of the same individual polypeptide. In other examples, a tetrameric molecule is generated from four copies of the same individual polypeptides. In further examples, a pentameric molecule is generated from five copies of the same individual polypeptides. In some embodiments of the configurations, the individual polypeptides of an immunomodulatory proteins containing a BIM and/or TIM are fused to a multimerization domain. The multimerization domain may be one that facilities dimerization, trimerization, tetramerization, or pentamerization of the polypeptide chains.

[0481] In some embodiments, the immunomodulatory protein forms a multimer, e.g., a dimer. In some embodiments, the dimer is a homodimer in which the two polypeptides of the immunomodoulatory protein are the same. In some embodiments, the dimer is a heterodimer in which the two polypeptides of the immunomodoulatory protein are different.

[0482] In some embodiments, a multimerization domain includes any capable of forming a stable protein-protein interaction. The multimerization domains can interact via an immunoglobulin sequence (e.g. Fc domain; see e.g., International Patent Pub. Nos. WO 93/10151 and WO 2005/063816 US; U.S. Pub. No. 2006/0024298; U.S. Pat. No. 5,457,035); leucine zipper (e.g. from nuclear transforming proteins fos and jun or the proto-oncogene c-myc or from General Control of Nitrogen (GCN4)) (ee e.g., Busch and Sassone-Corsi (1990) Trends Genetics, 6:36-40; Gentz et al., (1989) Science, 243:1695-1699); a hydrophobic region; a hydrophilic region; or a free thiol which forms an intermolecular disulfide bond between the chimeric molecules of a homo- or heteromultimer. In addition, a multimerization domain can include an amino acid sequence comprising a protuberance complementary to an amino acid sequence comprising a hole, such as is described, for example, in U.S. Pat. No. 5,731,168; International Patent Pub. Nos. WO 98/50431 and WO 2005/063816; Ridgway et al. (1996) Protein Engineering, 9:617-621. Such a multimerization region can be engineered such that steric interactions not only promote stable interaction, but further promote the formation of heterodimers over homodimers from a mixture of chimeric monomers. Generally, protuberances are constructed by replacing small amino acid side chains from the interface of the first polypeptide with larger side chains (e.g., tyrosine or tryptophan). Compensatory cavities of identical or similar size to the protuberances are optionally created on the interface of the second polypeptide by replacing large amino acid side chains with smaller ones (e.g., alanine or threonine). Exemplary multimerization domains are described below.

[0483] The BIM and/or TIM can be joined anywhere, but typically via its N- or C-terminus, to the N- or C-terminus of a multimerization domain to form a chimeric polypeptide. The linkage can be direct or indirect via a linker. Also, the chimeric polypeptide can be a fusion protein or can be formed by chemical linkage, such as through covalent or non-covalent interactions. For example, when preparing a chimeric polypeptide containing a multimerization domain, nucleic acid encoding all or part of a BIM and/or TIM can be operably linked to nucleic acid encoding the multimerization domain sequence, directly or indirectly or optionally via a linker domain. In some cases, the construct encodes a chimeric protein where the C-terminus of the BIM and/or TIM is joined to the N-terminus of the multimerization domain. In some instances, a construct can encode a chimeric protein where the N-terminus of the BIM and/or TIM is joined to the N- or C-terminus of the multimerization domain.

[0484] A polypeptide multimer contains two chimeric proteins created by linking, directly or indirectly, two of the same or different BIM and/or TIM directly or indirectly to a multimerization domain. In some examples, where the multimerization domain is a polypeptide, a gene fusion encoding the BIM and/or TIM and multimerization domain is inserted into an appropriate expression vector. The resulting chimeric or fusion protein can be expressed in host cells transformed with the recombinant expression vector, and allowed to assemble into multimers, where the multimerization domains interact to form multivalent polypeptides. Chemical linkage of multimerization domains to the BIM and/or TIM can be effected using heterobifunctional linkers.

[0485] The resulting chimeric polypeptides, such as fusion proteins, and multimers formed therefrom, can be purified by any suitable method such as, for example, by affinity chromatography over Protein A or Protein G columns. Where two nucleic acid molecules encoding different polypeptides are transformed into cells, formation of homo- and heterodimers will occur. Conditions for expression can be adjusted so that heterodimer formation is favored over homodimer formation.

[0486] In some embodiments, the immunomodulatory protein comprises a BIM and/or TIM attached to an immunoglobulin Fc (yielding an “immunomodulatory Fc fusion.”) In some embodiments, the attachment of the BIM and/or TIM is at the N-terminus of the Fc. In some embodiments, the attachment of the BIM and/or TIM is at the C-terminus of the Fc. In some embodiments, two or more BIM and/or TIM (the same or different) are independently attached at the N-terminus and at the C-terminus. Thus, homo- or heteromultimeric polypeptides can be generated from co-expression of separate BIM and/or TIM containing polypeptides. The first and second polypeptides can be the same or different. In some embodiments, the first and/or second polypeptide each contains two or more BIM and/or TIM linked to the Fc sequence. In some embodiments, the first and/or second polypeptide each contains three TIMs and one BIM linked to the Fc sequence. Exemplary Fc fusion formats of provided multi-domain immunomodulatory proteins are depicted in FIG. 16.

[0487] In some embodiments, the Fc is murine or human Fc. In some embodiments, the Fc is a mammalian or human IgG1, lgG2, lgG3, or lgG4 Fc regions.

[0488] In some embodiments, the Fc is derived from IgG1, such as human IgG1. In some embodiments, the Fc is an IgG1 Fc set forth in SEQ ID NO: 586 having an allotype containing residues Glu (E) and Met (M) at positions 356 and 358 by EU numbering. In some embodiments, the Fc comprises the amino acid sequence set forth in SEQ ID NO: 586 or a sequence of amino acids that exhibits at least about 85%, 86%, 87%, 88%, 89%, 90%, 91%, 92%, 93%, 94%, 95%, 96%, 97%, 98%, 99% or more sequence identity to SEQ ID NO: 586. In other embodiments, the Fc is IgG1 Fc that contains amino acids of the human G1 ml allotype, such as residues containing Asp (D) and Leu (L) at positions 356 and 358, e.g. as set forth in SEQ ID NO:597. Thus, in some cases, an Fc provided herein can contain amino acid substitutions E356D and M358L to reconstitute residues of allotype G1 ml. In some embodiments, the Fc comprises the amino acid sequence set forth in SEQ ID NO: 597 or a sequence of amino acids that exhibits at least about 85%, 86%, 87%, 88%, 89%, 90%, 91%, 92%, 93%, 94%, 95%, 96%, 97%, 98%, 99% or more sequence identity to SEQ ID NO: 597.

[0489] In some embodiments, the Fc region has the amino acid sequence set forth in SEQ ID NO:597.

(SEQ ID NO: 597)
EPKSSDKTHTCPPCPAPELLGGPSVFLFPPKPKDT
LMISRTPEVTCVVVDVSHEDPEVKFNWYVDGVEVH
NAKTKPREEQYNSTYRVVSVLTVLHQDWLNGKEYK
CKVSNKALPAPIEKTISKAKGQPREPQVYTLPPSR
DELTKNQVSLTCLVKGFYPSDIAVEWESNGQPENN
YKTTPPVLDSDGSFFLYSKLTVDKSRWQQGNVFSC
SVMHEALHNHYTQKSLSLSPG

[0490] In some embodiments, the variant Fc comprises the sequence set forth in SEQ ID NO: 755. In some embodiments, the variant Fc comprises the sequence set forth in SEQ ID NO:756. In some embodiments, an Fc region used in a construct provided herein can further lack a C-terminal lysine residue.

[0491] In some embodiments, the Fc is derived from IgG2, such as human IgG2. In some embodiments, the Fc comprises the amino acid sequence set forth in SEQ ID NO: 726 or a sequence of amino acids that exhibits at least 85%, 86%, 87%, 88%, 89%, 90%, 91%, 92%, 93%, 94%, 95%, 96%, 97%, 98%, 99% or more sequence identity to SEQ ID NO: 726. In some embodiments, the Fc region is an IgG2 Fc region that has the sequence set forth in SEQ ID NO: 726. In some embodiments, the Fc region is an IgG2 Fc region that has the sequence set forth in SEQ ID NO: 822.

[0492] In some embodiments, the Fe is derived from IgG4, such as human IgG4. In some embodiments, the Fc comprises the amino acid sequence set forth in SEQ ID NO: 727 or a sequence of amino acids that exhibits at least about 85%, 86%, 87%, 88%, 89%, 90%, 91%, 92%, 93%, 94%, 95%, 96%, 97%, 98%, 99% or more sequence identity to SEQ ID NO: 727. In some embodiments, the IgG4 Fc is a stabilized Fc in which the CH3 domain of human IgG4 is substituted with the CH3 domain of human IgG1 and which exhibits inhibited aggregate formation, an antibody in which the CH3 and CH2 domains of human IgG4 are substituted with the CH3 and CH2 domains of human IgG1, respectively, or an antibody in which arginine at position 409 indicated in the EU index proposed by Kabat et al. of human IgG4 is substituted with lysine and which exhibits inhibited aggregate formation (see e.g. U.S. Pat. No. 8,911,726. In some embodiments, the Fc is an IgG4 containing the S228P mutation, which has been shown to prevent recombination between a therapeutic antibody and an endogenous IgG4 by Fab-arm exchange (see e.g. Labrijin et al. (2009) Nat. Biotechnol., 27(8): 767-71.) In some embodiments, the Fc comprises the amino acid sequence set forth in SEQ ID NO: 728 or a sequence of amino acids that exhibits at least about 85%, 86%, 87%, 88%, 89%, 90%, 91%, 92%, 93%, 94%, 95%, 96%, 97%, 98%, 99% or more sequence identity to SEQ ID NO: 728. In some embodiments, the Fc region is an IgG4 Fc region set forth in SEQ ID NO:728. In some embodiments, the Fc region is an IgG4 Fc region set forth in SEQ ID NO:823.

[0493] In some embodiments, the Fc region contains one more modifications to alter (e.g. reduce) one or more of its normal functions. In general, the Fc region is responsible for effector functions, such as complement-dependent cytotoxicity (CDC) and antibody-dependent cell cytotoxicity (ADCC), in addition to the antigen-binding capacity, which is the main function of immunoglobulins. Additionally, the FcRn sequence present in the Fc region plays the role of regulating the IgG level in serum by increasing the in vivo half-life by conjugation to an in vivo FcRn receptor. In some embodiments, such functions can be reduced or altered in an Fc for use with the provided Fc fusion proteins.

[0494] In some embodiments, one or more amino acid modifications may be introduced into the Fc region, thereby generating an Fc region variant. In some embodiments, the Fc region variant has decreased effector function. There are many examples of changes or mutations to Fc sequences that can alter effector function. For example, WO 00/42072, WO2006019447, WO2012125850, WO2015/107026, US2016/0017041 and Shields et al. J Biol. Chem. 9(2): 6591-6604 (2001) describe exemplary Fc variants with improved or diminished binding to FcRs. The contents of those publications are specifically incorporated herein by reference.

[0495] In some embodiments, the provided immunomodulatory proteins comprise an Fc region that exhibits reduced effector functions, which makes it a desirable candidate for applications in which the half-life of the immunomodulatory protein in vivo is important yet certain effector functions (such as CDC and ADCC) are unnecessary or deleterious. In vitro and/or in vivo cytotoxicity assays can be conducted to confirm the reduction/depletion of CDC and/or ADCC activities. For example, Fc receptor (FcR) binding assays can be conducted to ensure that the immunomodulatory protein lacks FcγR binding (hence likely lacking ADCC activity), but retains FcRn binding ability. The primary cells for mediating ADCC, NK cells, express FcγRIII only, whereas monocytes express FcγRI, FcγRII and FcγRIII. FcR expression on hematopoietic cells is summarized in Table 2 on page 464 of Ravetch and Kinet, Annu. Rev. Immunol. 9:457-492 (1991). Non-limiting examples of in vitro assays to assess ADCC activity of a molecule of interest is described in U.S. Pat. No. 5,500,362 (see, e.g. Hellstrom, I. et al. Proc. Nat'l Acad. Sci. USA 83:7059-7063 (1986)) and Hellstrom, I et al., Proc. Nat'l Acad. Sci. USA 82:1499-1502 (1985); U.S. Pat. No. 5,821,337 (see Bruggemann, M. et al., J. Exp. Med. 166:1351-1361 (1987)). Alternatively, non-radioactive assay methods may be employed (see, for example, ACTI™ non-radioactive cytotoxicity assay for flow cytometry (CellTechnology, Inc. Mountain View, Calif.; and CytoTox 96™ non-radioactive cytotoxicity assay (Promega, Madison, Wis.). Useful effector cells for such assays include peripheral blood mononuclear cells (PBMC) and Natural Killer (NK) cells. Alternatively, or additionally, ADCC activity of the molecule of interest may be assessed in vivo, e.g., in an animal model such as that disclosed in Clynes et al. Proc. Nat'l Acad. Sci. USA 95:652-656 (1998). Clq binding assays may also be carried out to confirm that the immunomodulatory protein n is unable to bind Clq and hence lacks CDC activity. See, e.g., Clq and C3c binding ELISA in WO 2006/029879 and WO 2005/100402. To assess complement activation, a CDC assay may be performed (see, for example, Gazzano-Santoro et al., J. Immunol. Methods 202:163 (1996); Cragg, M. S. et al., Blood 101:1045-1052 (2003); and Cragg, M. S. and M. J. Glennie, Blood 103:2738-2743 (2004)). FcRn binding and in vivo clearance/half life determinations can also be performed using methods known in the art (see, e.g., Petkova, S. B. et al., Int'l. Immunol. 18(12):1759-1769 (2006)).

[0496] Immunomodulatory protein with reduced effector function include those with substitution of one or more of Fc region residues 238, 265, 269, 270, 297, 327 and 329 by EU numbering (U.S. Pat. No. 6,737,056). Such Fc mutants include Fc mutants with substitutions at two or more of amino acid positions 265, 269, 270, 297 and 327 by EU numbering, including the so-called “DANA” Fc mutant with substitution of residues 265 and 297 to alanine (U.S. Pat. No. 7,332,581).

[0497] In some aspects, a wild-type Fc is modified by one or more amino acid substitutions to reduce effector activity or to render the Fc inert for Fc effector function. Exemplary effectorless or inert mutations include those described herein. In some embodiments, the Fc region of immunomodulatory proteins has an Fc region in which any one or more of amino acids at positions 234, 235, 236, 237, 238, 239, 270, 297, 298, 325, and 329 (indicated by EU numbering) are substituted with different amino acids compared to the native Fc region. Such alterations of Fc region are not limited to the above-described alterations, and include, for example, alterations such as deglycosylated chains (N297A and N297Q), IgG1-N297G, IgG1-L234A/L235A, IgG1-L234A/L235E/G237A, IgG1-A325A/A330S/P331S, IgG1-C226S/C229S, IgG1-C226S/C229S/E233P/L234V/L235A, IgG1-E233P/L234V/L235A/G236del/S267K, IgG1-L234F/L235E/P331S, IgG1-S267E/L328F, IgG2-V234A/G237A, IgG2-H268Q/V309L/A330S/A331S, IgG4-L235A/G237A/E318A, and IgG4-L236E described in Current Opinion in Biotechnology (2009) 20 (6), 685-691; alterations such as G236R/L328R, L235G/G236R, N325A/L328R, and N325LL328R described in WO 2008/092117; amino acid insertions at positions 233, 234, 235, and 237 (indicated by EU numbering); and alterations at the sites described in WO 2000/042072.Certain Fc variants with improved or diminished binding to FcRs are described. (See, e.g., U.S. Pat. No. 6,737,056; WO 2004/056312, WO2006019447 and Shields et al., J. Biol. Chem. 9(2): 6591-6604 (2001).)

[0498] In some embodiments, there is provided an immunomodulatory protein comprising a variant Fc region comprising one or more amino acid substitutions which increase half-life and/or improve binding to the neonatal Fc receptor (FcRn). Antibodies with increased half-lives and improved binding to FcRn are described in US2005/0014934A1 (Hinton et al.) or WO2015107026. Those antibodies comprise an Fc region with one or more substitutions therein which improve binding of the Fc region to FcRn. Such Fc variants include those with substitutions at one or more of Fc region residues: 238, 256, 265, 272, 286, 303, 305, 307, 311, 312, 317, 340, 356, 360, 362, 376, 378, 380, 382, 413, 424 or 434 by EU numbering, e.g., substitution of Fc region residue 434 (U.S. Pat. No. 7,371,826).

[0499] In some embodiments, the Fc region of the immunomodulatory protein comprises one or more amino acid substitutions C220S, C226S and/or C229S by EU numbering. In some embodiments, the Fc region of the immunomodulatory protein comprises one or more amino acid substitutions R292C and V302C. See also Duncan & Winter, Nature 322:738-40 (1988); U.S. Pat. Nos. 5,648,260; 5,624,821; and WO 94/29351 concerning other examples of Fc region variants.

[0500] In some embodiments, alterations are made in the Fc region that result in diminished Clq binding and/or Complement Dependent Cytotoxicity (CDC), e.g., as described in U.S. Pat. No. 6,194,551, WO 99/51642, and Idusogie et al., J. Immunol. 164: 4178-4184 (2000).

[0501] In some embodiments, there is provided an immunomodulatory protein comprising a variant Fc region comprising one or more amino acid modifications, wherein the variant Fc region is derived from a wild-type IgG1, such as a wild-type human IgG1. In some embodiments, the wild-type IgG1 Fc can be the Fc set forth in SEQ ID NO: 586 having an allotype containing residues Glu (E) and Met (M) at positions 356 and 358 by EU numbering. In some embodiments, the variant Fc region is derived from the amino acid sequence set forth in SEQ ID NO: 586. In other embodiments, the wild-type IgG1 Fc contains amino acids of the human Glml allotype, such as residues containing Asp (D) and Leu (L) at positions 356 and 358, e.g. as set forth in SEQ ID NO:597. Thus, in some cases, the variant Fc is derived from the amino acid sequence set forth in SEQ ID NO:597.

[0502] In some embodiments, the Fe region lacks the C-terminal lysine corresponding to position 232 of the wild-type or unmodified Fc set forth in SEQ ID NO: 586 or 597 (corresponding to K447del by EU numbering).

[0503] In some embodiments, the Fc contains at least one amino acid substitution that is N82G by numbering of SEQ ID NO: 586 (corresponding to N297G by EU numbering). In some embodiments, the Fc further contains at least one amino acid substitution that is R77C or V87C by numbering of SEQ ID NO: 586 (corresponding to R292C or V302C by EU numbering). In some embodiments, the variant Fc region further comprises a C5S amino acid modification by numbering of SEQ ID NO: 586 (corresponding to C220S by EU numbering). For example, in some embodiments, the variant Fc region comprises the following amino acid modifications: N297G and one or more of the following amino acid modifications C220S, R292C or V302C by EU numbering (corresponding to N82G and one or more of the following amino acid modifications C5S, R77C or V87C with reference to SEQ ID NO:586), e.g., the Fc region comprises the sequence set forth in SEQ ID NO:598.

[0504] In some embodiments, the variant Fc contains the amino acid substitutions L234A/L235E/G237A, by EU numbering. In some embodiments, the variant Fc contains the amino acid substitutions A330S/P331S, by EU numbering. In some embodiments, the variant Fc contains the amino acid substitutions L234A/L235E/G237A/A330S/P331S (Gross et al. (2001) Immunity 15:289). In some embodiments, the variant Fc comprises the sequence set forth in SEQ ID NO: 757. In some embodiments, the variant Fc comprises the sequence set forth in SEQ ID NO:758. In some embodiments, an Fc region used in a construct provided herein can further lack a C-terminal lysine residue.

[0505] In some embodiments, the variant Fc using in immunomodulatory protein constructs provided herein can include effectorless mutations L234A, L235E and G237A by EU numbering. In some embodiments, a wild-type Fc is further modified by the removal of one or more cysteine residue, such as by replacement of the cysteine residues to a serine residue at position 220 (C220S) by EU numbering. Exemplary inert Fc regions having reduced effector function are set forth in SEQ ID NO: 599 and SEQ ID NO:591, which are based on allotypes set forth in SEQ ID NO:586 or SEQ ID NO: 597, respectively. In some embodiments, an Fc region used in a construct provided herein can further lack a C-terminal lysine residue. In some embodiments, the variant Fc region comprises one or more of the amino acid modifications C220S, L234A, L235E or G237A, e.g. the Fc region comprises the sequence set forth in SEQ ID NO:589, 591, 599 or 724. In some embodiments, the variant Fc comprises has the sequence set forth in SEQ ID NO: 589. In some embodiments, the variant Fc comprises has the sequence set forth in SEQ ID NO: 591. In some embodiments, the variant Fc comprises has the sequence set forth in SEQ ID NO: 599. In some embodiments, the variant Fc comprises has the sequence set forth in SEQ ID NO: 724.

[0506] In some embodiments, the Fe region is a variant Fc that has the sequence set forth in SEQ ID NO:589.

(SEQ ID NO: 589)
EPKSSDKTHTCPPCPAPEAEGAPSVFLFPPKPKDT
LMISRTPEVTCVVVDVSHEDPEVKFNWYVDGVEV
HNAKTKPREEQYNSTYRVVSVLTVLHQDWLNGKEY
KCKVSNKALPAPIEKTISKAKGQPREPQVYTLPPS
RDELTKNQVSLTCLVKGFYPSDIAVEWESNGQPEN
NYKTTPPVLDSDGSFFLYSKLTVDKSRWQQGNVFS
CSVMHEALHNHYTQKSLSLSPG

[0507] In some embodiments, the Fc region is a variant Fc that has the sequence set forth in SEQ ID NO: 824.

(SEQ ID NO: 824)
DKTHTCPPCPAPEAEGAPSVFLFPPKPKDTLMISR
TPEVTCVVVDVSHEDPEVKFNWYVDGVEVHNAKTK
PREEQYNSTYRVVSVLTVLHQDWLNGKEYKCKVSN
KALPAPIEKTISKAKGQPREPQVYTLPPSRDELTK
NQVSLTCLVKGFYPSDIAVEWESNGQPENNYKTTP
PVLDSDGSFFLYSKLTVDKSRWQQGNVFSCSVMHE
ALHNHYTQKSLSLSPG

[0508] In some embodiments, the variant Fc region comprises one or more of the amino acid modifications C220S, L235P, L234V, L235A, G236del or S267K, e.g. the Fc region comprises the sequence set forth in SEQ ID NO:722. In some embodiments, the Fc region lacks the C-terminal lysine corresponding to position 232 of the wild-type or unmodified Fc set forth in SEQ ID NO: 586 (corresponding to K447del by EU numbering).

[0509] In some embodiments, the variant Fc region comprises one or more of the amino acid modifications C220S, R292C, N297G, V302C. In some embodiments, the Fc region lacks the C-terminal lysine corresponding to position 232 of the wild-type or unmodified Fc set forth in SEQ ID NO: 586 (corresponding to K447del by EU numbering). An exemplary variant Fc region for use in the immunomodulatory protein constructs is set forth in SEQ ID NO: 723.

[0510] In some embodiments, the variant Fc region comprises one or more of the amino acid modifications C220S/E233P/L234V/L235A/G236del/S267K. In some embodiments, the Fc region lacks the C-terminal lysine corresponding to position 232 of the wild-type or unmodified Fc set forth in SEQ ID NO: 586 (corresponding to K447del by EU numbering). An exemplary variant Fc region for use in the immunomodulatory protein constructs is set forth in SEQ ID NO: 725.

[0511] In some embodiments, the immunomodulatory protein is a homodimer that contains a first immunomodulatory Fc fusion polypeptide and a second immunomodulatory Fc fusion polypeptide in which the first and second polypeptide are the same. In some embodiments, a first Fc polypeptide fusion contains an Fc region and one or more BIM and/or TIM and a second polypeptide fusion contains the same Fc region and the same one or more BIM and/or TIM. In such embodiments, the Fc region can be any as described above.

[0512] Examples of such Fc regions for inclusion in an immunomodulatory polypeptide are set forth in Table 4.

TABLE 4
Exemplary Fc Regions, wild-type or variant (effectorless)

| | 356E/358M | 356D/358L |
|---|---|---|
| | allotype | allotype |
| Fc mutations (EU numbering) | SEQ ID NO | SEQ ID NO |
| (wild-type) | 586 | 597 (with |
| | | C220S, |
| | | K447del |
| C220S, R292C, N297G, V302C | 598 | |
| C220S, R292C, N297G, V302C, K447del | 726 | |
| C220S, L234A, L235E, G237A | 599 | 591 |
| C220S, L234A, L235E, G237A, K447del | 724 | 589 |
| L234A, L235E, G237A, K447del, with deletion | | 824 |
| of hinge | | |
| C220S, L235P, L234V, L235A, G236del, | 722 | |
| S267K | | |
| C220S/E233P/L234V/L235A/G236del/S267K/ | 725 | |
| K447del | | |
| L234A, L235E, G237A, A330S, P331S | | 758 |
| L234A, L235E, G237A, A330S, P331S, with | | 757 |
| deletion of hinge | | |

[0513] In some embodiments, there is provided an immunomodulatory protein comprising at least one BIM (e.g. as described in Section III.A), at least one TIM (e.g. any set forth in Section III. B), and variant Fc region that exhibits reduced effector activity compared to a wild-type IgG1 set forth in SEQ ID NO:586 or 597. In some embodiments, the variant Fc comprises the sequence of amino acids set forth in any of SEQ ID NOS:591, 598, 599, 722, 589, 723, 724, 725, 757, 758 or 824 or a sequence of amino acids that exhibits at least 85%, 86%, 87%, 88%, 89%, 90%, 91%, 92%, 93%, 94%, 95%, 96%, 97%, 98%, 99% or more sequence identity to any of SEQ ID NOS: 591, 598, 599, 722, 589, 723, 724, 725, 757, 758 or 824. For example, provided herein is an immunomodulatory protein comprising at least one BIM (e.g. as described in Section III.A), at least one TIM (e.g. any set forth in Section III.B), and variant Fc region set forth in SEQ ID NO:589. In embodiments, when produced and expressed from a cells, the provided immunomodulatory protein is a homodimer containing two identical polypeptide chains.

[0514] In some embodiments, the immunomodulatory protein contains a first immunomodulatory Fc fusion polypeptide and a second immunomodulatory Fc fusion polypeptide in which the first and second polypeptide are different. In some embodiments, a first Fc polypeptide fusion contains an Fc region and one or more BIM and/or TIM and a second polypeptide fusion contains an Fc region and one or more BIM and/or TIM. In such embodiments, the Fc region can be a region that promotes or facilitates formation of heterodimers.

[0515] In some embodiments, the Fc domain of one or both of the first and second immunomodulatory Fc fusion polypeptides comprise a modification (e.g. substitution) such that the interface of the Fc molecule is modified to facilitate and/or promote heterodimerization. Methods to promote heterodimerization of Fc chains include mutagenesis of the Fc region, such as by including a set of “knob-into-hole” mutations or including mutations to effect electrostatic steering of the Fc to favor attractive interactions among different polypeptide chains. In some embodiments, the Fc region of the heterodimeric molecule additionally can contain one or more other Fc mutation, such as any described above. In some embodiments, the heterodimer molecule contains an Fc region with a mutation that reduces effector function. In some embodiments, such Fc regions contain mutations C220S, L234A, L235E and/or G237A by EU numbering. In some embodiments, any of the above mutations in an Fc backbone can be made in an allotype containing residues Glu (E) and Met (M) at positions 356 and 358 by EU numbering. In other embodiments, any of the above mutations in an Fc backbone can be made in an allotype containing residue Asp (D) and Leu (L) at positions 356 and 358 by EU numbering.

[0516] In some embodiments, modifications include introduction of a protuberance (knob) into a first Fc polypeptide and a cavity (hole) into a second Fc polypeptide such that the protuberance is positionable in the cavity to promote complexing of the first and second Fc-containing polypeptides. Amino acids targeted for replacement and/or modification to create protuberances or cavities in a polypeptide are typically interface amino acids that interact or contact with one or more amino acids in the interface of a second polypeptide.

[0517] In some embodiments, a first polypeptide that is modified to contain protuberance (knob) amino acids include replacement of a native or original amino acid with an amino acid that has at least one side chain which projects from the interface of the first polypeptide and is therefore positionable in a compensatory cavity (hole) in an adjacent interface of a second polypeptide. Most often, the replacement amino acid is one which has a larger side chain volume than the original amino acid residue. One of skill in the art knows how to determine and/or assess the properties of amino acid residues to identify those that are ideal replacement amino acids to create a protuberance. In some embodiments, the replacement residues for the formation of a protuberance are naturally occurring amino acid residues and include, for example, arginine (R), phenylalanine (F), tyrosine (Y), or tryptophan (W). In some examples, the original residue identified for replacement is an amino acid residue that has a small side chain such as, for example, alanine, asparagine, aspartic acid, glycine, serine, threonine, or valine.

[0518] In some embodiments, a second polypeptide that is modified to contain a cavity (hole) is one that includes replacement of a native or original amino acid with an amino acid that has at least one side chain that is recessed from the interface of the second polypeptide and thus is able to accommodate a corresponding protuberance from the interface of a first polypeptide. Most often, the replacement amino acid is one which has a smaller side chain volume than the original amino acid residue. One of skill in the art knows how to determine and/or assess the properties of amino acid residues to identify those that are ideal replacement residues for the formation of a cavity. Generally, the replacement residues for the formation of a cavity are naturally occurring amino acids and include, for example, alanine (A), serine (S), threonine (T) and valine (V). In some examples, the original amino acid identified for replacement is an amino acid that has a large side chain such as, for example, tyrosine, arginine, phenylalanine, or tryptophan.

[0519] The CH3 interface of human IgG1, for example, involves sixteen residues on each domain located on four anti-parallel β-strands which buries 1090 Å2 from each surface (see e.g., Deisenhofer et al. (1981) Biochemistry, 20:2361-2370; Miller et al., (1990) J Mol. Biol., 216, 965-973; Ridgway et al., (1996) Prot. Engin., 9: 617-621; U.S. Pat. No. 5,731,168). Modifications of a CH3 domain to create protuberances or cavities are described, for example, in U.S. Pat. No. 5,731,168; International Patent Applications WO98/50431 and WO 2005/063816; and Ridgway et al., (1996) Prot. Engin., 9: 617-621. In some examples, modifications of a CH3 domain to create protuberances or cavities are typically targeted to residues located on the two central anti-parallel β-strands. The aim is to minimize the risk that the protuberances which are created can be accommodated by protruding into the surrounding solvent rather than being accommodated by a compensatory cavity in the partner CH3 domain.

[0520] In some embodiments, the heterodimeric molecule contains a T366W mutation in the CH3 domain of the “knobs chain” and T366S, L368A, Y407V mutations in the CH3 domain of the “hole chain”. In some cases, an additional interchain disulfide bridge between the CH3 domains can also be used (Merchant, A. M., et al., Nature Biotech. 16 (1998) 677-681) e.g. by introducing a Y349C mutation into the CH3 domain of the “knobs” or “hole” chain and a E356C mutation or a S354C mutation into the CH3 domain of the other chain. In some embodiments, the heterodimeric molecule contains S354C, T366W mutations in one of the two CH3 domains and Y349C, T366S, L368A, Y407V mutations in the other of the two CH3 domains. For example, the knob Fc may contain the sequence set forth in SEQ ID NO: 669, containing S354C and T366W, and a hole Fc set forth in SEQ ID NO: 670, containing mutations Y349C, T366S, L368A and Y407V). In some embodiments, the heterodimeric molecule comprises E356C, T366W mutations in one of the two CH3 domains and Y349C, T366S, L368A, Y407V mutations in the other of the two CH3 domains. In some embodiments, the heterodimeric molecule comprises Y349C, T366W mutations in one of the two CH3 domains and E356C, T366S, L368A, Y407V mutations in the other of the two CH3 domains. In some embodiments, the heterodimeric molecule comprises Y349C, T366W mutations in one of the two CH3 domains and S354C, T366S, L368A, Y407V mutations in the other of the two CH3 domains. Examples of other knobs-in-holes technologies are known in the art, e.g. as described by EP 1 870 459 A1.

[0521] In some embodiments, an Fc variant containing CH3 protuberance (knob) or cavity(hole) modifications can be joined to a multi-domain immunomodulatory polypeptide anywhere, but typically via its N- or C-terminus, to the N- or C-terminus of the one or more BIM or TIM, such as to form a fusion polypeptide. The linkage can be direct or indirect via a linker. Typically, a knob and hole molecule is generated by co-expression of a first stacked immunomodulatory polypeptide linked to an Fc variant containing CH3 protuberance modification(s) with a second stacked immunomodulatory polypeptide linked to an Fc variant containing CH3 cavity modification(s).

[0522] Exemplary sequences for knob and hole Fc polypeptides are set forth in SEQ ID NOs: 716, and 717, respectively. In some embodiments, the knob or hold Fc region lacks the C-terminal lysine corresponding to position 232 of the wild-type or unmodified Fc set forth in SEQ ID NO: 586 (corresponding to K447del by EU numbering). Exemplary sequences for knob and hole Fc polypeptides are set forth in SEQ ID NOs: 669, and 670, respectively.

[0523] In some embodiments, there is provided an immunomodulatory protein comprising a first polypeptide containing at least one BIM (e.g. as described in Section III.A) and/or at least one TIM (e.g. any set forth in Section III. B), and a first variant Fc set forth in SEQ ID NO:716; and a second polypeptide containing at least one BIM (e.g. as described in Section III.A) and/or at least one TIM (e.g. any set forth in Section III. B), and a second variant Fc set forth in SEQ ID NO:717. In some embodiments, there is provided an immunomodulatory protein comprising a first polypeptide containing at least one BIM (e.g. as described in Section III.A) and/or at least one TIM (e.g. any set forth in Section III. B), and a first variant Fc set forth in SEQ ID NO:669; and a second polypeptide containing at least one BIM (e.g. as described in Section III.A) and/or at least one TIM (e.g. any set forth in Section III. B), and a second variant Fc set forth in SEQ ID NO:670. In embodiments, when produced and expressed from a cells, the provided immunomodulatory protein is a heterodimer containing two different polypeptide chains. In example, one of the polypeptides can express a TIM and one of the polypeptides can express a BIM.

[0524] In some embodiments, the Fc region of each polypeptide of a heterodimer includes a mutation to altered charge polarity across the Fc dimer interface such that coexpression of electrostatically matched Fc chains support favorable attractive interactions thereby promoting desired Fc heterodimer formation, whereas unfavorable repulsive charge interactions suppress unwanted Fc homodimer formation (Guneskaran et al. (2010) JBC, 285: 19637-19646). In some embodiments, at least one polypeptide containing an BIM and/or TIM is linked directly or indirectly to an Fc containing mutations to positively charged residues (e.g. E356K, E357K and/or D399K by EU numbering; designated K chain set forth), such as set forth in SEQ ID NO:729. In such embodiments, the other polypeptide of the heterodimer containing an BIM and/or TIM is linked directly or indirectly to an Fc containing mutations to negatively charged residues (e.g. K370D, K392D and K409D by EU numbering; designated D chain), such as set forth in SEQ ID NO:730. When co-expressed in a cell, association between the K and D chains is possible but the chains do not substantially self-associate due to charge repulsion.

[0525] In some embodiments, there is provided an immunomodulatory protein comprising a first polypeptide containing at least one BIM (e.g. as described in Section III.A) and/or at least one TIM (e.g. any set forth in Section III. B), and a first variant Fc set forth in SEQ ID NO:729; and a second polypeptide containing at least one BIM (e.g. as described in Section III.A) and/or at least one TIM (e.g. any set forth in Section III. B), and a second variant Fc set forth in SEQ ID NO:730. In embodiments, when produced and expressed from a cells, the provided immunomodulatory protein is a heterodimer containing two different polypeptide chains. In example, one of the polypeptides can express a TIM and one of the polypeptides can express a BIM.

[0526] In some embodiments, individual polypeptide of a multi-domain polypeptide or individual polypeptides of a single-domain polypeptide are linked to a multimerization domain that forms an immunomodulatory protein is a trimer, tetramer or pentamer. In some embodiments, the individual polypeptides of such a molecule are the same. In some embodiments, such a multimerization domain is a cartilage oligomeric matrix protein (COMP) assembly domain, a vasodilator-stimulated phosphoprotein (VASP) tetramerization domain or a ZymoZipper (ZZ) 12.6 domain.

[0527] In some embodiments, the multimerization domain is a portion of the cartilage oligomeric matrix protein (COMP) assembly domain (Voulgaraki et al., Immunology (2005) 115(3):337-346. In some examples, the COMP is or contains an amino acid sequence as set forth in SEQ ID NO: 734 (e.g. amino acids 29-72 of the full length COMP, Uniprot accession number P49747) or a sequence that has 85%, 85%, 87%, 88%, 89%, 90%, 91%, 92%, 93%, 94%, 95%, 96%, 97%, 98%, 99% or more sequence identity to SEQ ID NO: 734.

[0528] In some embodiments, the multimerization domain is a vasodilator-stimulated phosphoprotein (VASP) tetramerization domain (Bachmann et al., J Biol Chem (1999) 274(33):23549-23557). In some embodiments, the VASP is or contains an amino acid sequence as set forth in SEQ ID NO: 735 (e.g. amino acids 343-375 of the full length VASP; Uniprot accession number P50552) or a sequence that has 85%, 85%, 87%, 88%, 89%, 90%, 91%, 92%, 93%, 94%, 95%, 96%, 97%, 98%, 99% or more sequence identity to SEQ ID NO: 735.

[0529] In some embodiments, the multimerization domain is a ZymoZipper (ZZ) 12.6 domain. In some embodiments, the ZZ domain is or contains an amino acid sequence as set forth in SEQ ID NO: 736 (See U.S. Pat. No. 7,655,439) or a sequence that has 85%, 85%, 87%, 88%, 89%, 90%, 91%, 92%, 93%, 94%, 95%, 96%, 97%, 98%, 99% or more sequence identity to SEQ ID NO: 736.

[0530] In some configurations, a first and second polypeptide of a heterodimeric Fc fusion protein can be linked to a moiety for detection and/or purification. In some aspects, the first and second polypeptide are linked to different tags or moieties. In some aspects, the tag or moiety of the first and second polypeptide is independently selected from a poly-histidine tag (HHHHHH; SEQ ID NO: 702), a flag-tag (DYKDDDDK; SEQ ID NO: 588), a Myc-tag, or fluorescent protein-tags (e.g., EGFP, set forth in SEQ ID NOs:731, 732 or 733). In some examples, the first polypeptide containing an BIM and the second polypeptide containing an TIM each further contain a moiety for detection and/or purification, such as a poly-histidine tag (HHHHHH; SEQ ID NO: 702) and/or a flag-tag (DYKDDDDK; SEQ ID NO: 588).

[0531] In some embodiments, the BIM and/or TIM is directly linked to the Fc sequence. In some embodiments, the BIM and/or TIM is indirectly linked to the Fc sequence, such as via a linker. In some embodiments, one or more “peptide linkers” link the BIM and/or TIM and the Fc domain. In some embodiments, a peptide linker can be a single amino acid residue or greater in length. In some embodiments, the peptide linker has at least one amino acid residue but is no more than 20, 19, 18, 17, 16, 15, 14, 13, 12, 11, 10, 9, 8, 7, 6, 5, 4, 3, 2, or 1 amino acid residues in length. Exemplary linkers are set forth in subsection “Linker.”

[0532] In some embodiments, the linker is (in one-letter amino acid code): GGGGS (“4GS”; SEQ ID NO: 593) or multimers of the 4GS linker, such as repeats of 2, 3, 4, or 5 4GS linkers. In some embodiments, the peptide linker is the peptide linker is (GGGGS)₂ (SEQ ID NO: 594), (GGGGS)₃ (SEQ ID NO: 595), (GGGGS)₄ (SEQ ID NO: 600) or (GGGGS)₅ (SEQ ID NO: 671). In some embodiments, the linker also can include a series of alanine residues alone or in addition to another peptide linker (such as a 4GS linker or multimer thereof). In some embodiments, the linker (in one-letter amino acid code) is GSGGGGS (SEQ ID NO: 590) or GGGGSSA (SEQ ID NO: 596). In some examples, the linker is a 2×GGGGS followed by three alanines (GGGGSGGGGSAAA; SEQ ID NO:721).

[0533] Also provided are nucleic acid molecules encoding the immunomodulatory protein. In some embodiments, for production of immunomodulatory protein, a nucleic acid molecule encoding the immunomodulatory protein is inserted into an appropriate expression vector. The resulting immunomodulatory protein can be expressed in host cells transformed with the expression where assembly between Fc domains occurs by interchain disulfide bonds formed between the Fc moieties to yield dimeric, such as divalent, immunomodulatory proteins.

[0534] The resulting immunomodulatory protein containing an BIM, TIM, and Fc, can be easily purified by affinity chromatography over Protein A or Protein G columns. For the generation of heterodimers, additional steps for purification can be necessary. For example, where two nucleic acids encoding different immunomodulatory proteins are transformed into cells, the formation of heterodimers must be biochemically achieved since immunomodulatory protein carrying the Fc-domain will be expressed as disulfide-linked homodimers as well. Thus, homodimers can be reduced under conditions that favor the disruption of interchain disulfides, but do no effect intra-chain disulfides. In some cases, different immunomodulatory protein monomers are mixed in equimolar amounts and oxidized to form a mixture of homo- and heterodimers. The components of this mixture are separated by chromatographic techniques. Alternatively, the formation of this type of heterodimer can be biased by genetically engineering and expressing immunomodulatory proteins containing Fc fusion molecules that contain one or more BIM and/or TIM using knob-into-hole methods described below.

[0535] 3. Tags or Moieties

[0536] In some embodiments, the one or more polypeptides containing a BIM and/or TIM in the provided immunomodulatory proteins can further include a tag or moiety. In some embodiments, the further moiety is a protein, peptide, small molecule or nucleic acid. In some cases, the immunomodulatory protein is linked, directly or indirectly to more than one further moiety, such as 2, 3, 4, 5, or 6, further moieties.

[0537] In some embodiments, the moiety is a half-life extending molecule. Exemplary of such half-life extending molecules include, but are not limited to, albumin, an albumin-binding polypeptide, Pro/Ala/Ser (PAS), a C-terminal peptide (CTP) of the beta subunit of human chorionic gonadotropin, polyethylene glycol (PEG), long unstructured hydrophilic sequences of amino acids (XTEN), hydroxyethyl starch (HES), an albumin-binding small molecule, or a combination thereof.

[0538] In some embodiments, the immunomodulatory polypeptide comprising BIM and/or TIM can include conformationally disordered polypeptide sequences composed of the amino acids Pro, Ala, and Ser (See e.g., WO2008/155134, SEQ ID NO: 904). In some cases, the amino acid repeat is at least 3, 4, 5, 6, 7, 8, 9, 10, 11, 12, 13, 14, 15, 16, 17, 18, 19, 20, 21, 22, 23, 24, 25, 26, 27, 28, 29, 30 or more amino acid residues, wherein each repeat comprises (an) Ala, Ser, and Pro residue(s). Thus, provided herein is an immunomodulatory protein is a PASylated protein wherein the BIM and/or TIM are linked, directly or indirectly via a linker, to Pro/Ala/Ser (PAS). In some embodiments, one or more additional linker structures may be used.

[0539] In some embodiments, the moiety facilitates detection or purification of the immunomodulatory protein. In some cases, the immunomodulatory protein, such as at least one of or each polypeptide of a multimer (e.g. dimer, trimer, tetramer, or pentamer) thereof, comprises a tag or moiety, e.g. affinity or purification tag, linked. In some aspects, such a tag or moiety can be linked directly or indirectly via a linker to the N- and/or c-terminus of the polypeptide. Various suitable polypeptide tags and/or fusion domains are known, and include but are not limited to, a poly-histidine (His) tag (SEQ ID NO:702), a FLAG-tag (SEQ ID NO:588), a Myc-tag, and fluorescent protein-tags (e.g., EGFP, set forth in SEQ ID NOs:734, 735, or 736. In some cases, the tag is a His tag containing at least six histidine residues (set forth in SEQ ID NO:702).

[0540] In some cases, the immunomodulatory protein comprising a BIM and TIM further comprises various combinations of moieties. For example, the immunomodulatory protein comprising BIM or TIM further comprises one or more polyhistidine-tag and FLAG tag. In some cases, the combination of moieties, such as two or more moieties, can be included on the same polypeptide. In some cases, the combination of moieties, such as two or more moieties, can be included on different polypeptide, such as in connection with embodiments relating to heterodimeric immunomodulatory polypeptides.

### IV. Nucleic Acids, Vectors and Methods for Producing the Polypeptides or Cells

[0541] Provided herein are isolated or recombinant nucleic acids collectively referred to as “nucleic acids” which encode any of the immunomodulatory proteins provided herein. In some embodiments, nucleic acids provided herein, including all described below, are useful in recombinant production (e.g., expression) of immunomodulatory proteins provided herein. In some embodiments, nucleic acids provided herein, including all described below, are useful in expression of immunomodulatory proteins provided herein, such as BCMA fusion proteins or multi-domain immunomodulatory proteins provided herein. The nucleic acids provided herein can be in the form of RNA or in the form of DNA, and include mRNA, cRNA, recombinant or synthetic RNA and DNA, and cDNA. The nucleic acids provided herein are typically DNA molecules, and usually double-stranded DNA molecules. However, single-stranded DNA, single-stranded RNA, double-stranded RNA, and hybrid DNA/RNA nucleic acids or combinations thereof comprising any of the nucleotide sequences of the invention also are provided.

[0542] In some cases, a heterologous (non-native) signal peptide can be added to the nucleic acid encoding the immunomodulatory protein. This may be desired, for example, in the case of expression of BCMA fusion proteins or provided multi-domain immunomodulatory proteins, which do not contain an amino terminal signal sequence. In some embodiments, the signal peptide is a signal peptide from an immunoglobulin (such as IgG heavy chain or IgG-kappa light chain), a cytokine (such as interleukin-2 (IL-2), or CD33), a serum albumin protein (e.g. HSA or albumin), a human azurocidin preprotein signal sequence, a luciferase, a trypsinogen (e.g. chymotrypsinogen or trypsinogen) or other signal peptide able to efficiently express and, in some aspects, secret a protein from a cell. Exemplary signal peptides include any described in the Table 5.

TABLE 5
Exemplary Signal Peptides

| SEQ ID | Signal | |
|---|---|---|
| NO | Peptide | Peptide Sequence |
| SEQ ID | HSA | MKWVTFISLLFLFSSAYS |
| NO: 737 | signal | |
| | peptide | |
| SEQ ID | Ig | MDMRAPAGIFGFLLVLFPGYRS |
| NO: 738 | kappa | |
| | light | |
| | chain | |
| SEQ ID | human | MTRLTVLALLAGLLASSRA |
| NO: 739 | azurocidin | |
| | preprotein | |
| | signal | |
| | sequence | |
| SEQ ID | IgG | |
| NO: 740 | heavy | |
| | chain | |
| | signal | |
| | peptide | |
| SEQ ID | IgG | MELGLRWVFLVAILEGVQC |
| NO: 741 | heavy | |
| | chain | |
| | signal | |
| | peptide | |
| SEQ ID | IgG | MKHLWFFLLLVAAPRWVLS |
| NO: 742 | heavy | |
| | chain | |
| | signal | |
| | peptide | |
| SEQ ID | IgG | MDWTWRILFLVAAATGAHS |
| NO: 743 | heavy | |
| | chain | |
| | signal | |
| | peptide | |
| SEQ ID | IgG | MDWTWRFLFVVAAATGVQS |
| NO: 744 | heavy | |
| | chain | |
| | signal | |
| | peptide | |
| SEQ ID | IgG | MEFGLSWLFLVAILKGVQC |
| NO: 745 | heavy | |
| | chain | |
| | signal | |
| | peptide | |
| SEQ ID | IgG | MEFGLSWVFLVALFRGVQC |
| NO: 746 | heavy | |
| | chain | |
| | signal | |
| | peptide | |
| SEQ ID | IgG | MDLLHKNMKHLWFFLLLVA |
| NO: 747 | heavy | APRWVLS |
| | chain | |
| | signal | |
| | peptide | |
| SEQ ID | IgG | MDMRVPAQLLGLLLLWLSG |
| NO: 748 | Kappa | ARC |
| | light | |
| | chain | |
| | signal | |
| | sequences: | |
| SEQ ID | IgG | MKYLLPTAAAGLLLLAAQP |
| NO: 749 | Kappa | AMA |
| | light | |
| | chain | |
| | signal | |
| | sequences: | |
| SEQ ID | Gaussia | MGVKVLFALICIAVAEA |
| NO: 750 | luciferase | |
| SEQ ID | Human | MKWVTFISLLFLFSSAYS |
| NO: 751 | albumin | |
| SEQ ID | Human | MAFLWLLSCWALLGTTFG |
| NO: 752 | chymotrypsinogen | |
| SEQ ID | Human | MQLLSCIALILALV |
| NO: 753 | interleukin-2 | |
| SEQ ID | Human | MNLLLILTFVAAAVA |
| NO: 754 | trypsinogen-2 | |

[0543] In some embodiments, the immunomodulatory protein comprises a signal peptide when expressed, and the signal peptide (or a portion thereof) is cleaved from the immunomodulatory protein upon secretion.

[0544] Also provided herein are recombinant expression vectors and recombinant host cells useful in producing the immunomodulatory proteins, such as BCMA fusion proteins or multi-domain immunomodulatory proteins provided herein.

[0545] In any of the above provided embodiments, the nucleic acids encoding the immunomodulatory polypeptides provided herein can be introduced into cells using recombinant DNA and cloning techniques. To do so, a recombinant DNA molecule encoding an immunomodulatory polypeptide is prepared. Methods of preparing such DNA molecules are well known in the art. For instance, sequences coding for the peptides could be excised from DNA using suitable restriction enzymes. Alternatively, the DNA molecule could be synthesized using chemical synthesis techniques, such as the phosphoramidite method. Also, a combination of these techniques could be used. In some instances, a recombinant or synthetic nucleic acid may be generated through polymerase chain reaction (PCR). A DNA insert encoding an immunomodulatory protein can be cloned into an appropriate transduction/transfection vector as is known to those of skill in the art. Also provided are expression vectors containing the nucleic acid molecules.

[0546] In some embodiments, the expression vectors are capable of expressing the immunomodulatory proteins in an appropriate cell under conditions suited to expression of the protein. In some aspects, nucleic acid molecule or an expression vector comprises the DNA molecule that encodes the immunomodulatory protein operatively linked to appropriate expression control sequences. Methods of effecting this operative linking, either before or after the DNA molecule is inserted into the vector, are well known. Expression control sequences include promoters, activators, enhancers, operators, ribosomal binding sites, start signals, stop signals, cap signals, polyadenylation signals, and other signals involved with the control of transcription or translation.

[0547] In some embodiments, expression of the immunomodulatory protein is controlled by a promoter or enhancer to control or regulate expression. The promoter is operably linked to the portion of the nucleic acid molecule encoding the variant polypeptide or immunomodulatory protein.

[0548] The resulting recombinant expression vector having the DNA molecule thereon is used to transform an appropriate host. This transformation can be performed using methods well known in the art. In some embodiments, a nucleic acid provided herein further comprises nucleotide sequence that encodes a secretory or signal peptide operably linked to the nucleic acid encoding an immunomodulatory polypeptide such that a resultant soluble immunomodulatory polypeptide is recovered from the culture medium, host cell, or host cell periplasm. In other embodiments, the appropriate expression control signals are chosen to allow for membrane expression of an immunomodulatory polypeptide. Furthermore, commercially available kits as well as contract manufacturing companies can also be utilized to make engineered cells or recombinant host cells provided herein.

[0549] In some embodiments, the resulting expression vector having the DNA molecule thereon is used to transform, such as transduce, an appropriate cell. The introduction can be performed using methods well known in the art. Exemplary methods include those for transfer of nucleic acids encoding the receptors, including via viral, e.g., retroviral or lentiviral, transduction, transposons, and electroporation. In some embodiments, the expression vector is a viral vector. In some embodiments, the nucleic acid is transferred into cells by lentiviral or retroviral transduction methods.

[0550] Any of a large number of publicly available and well-known mammalian host cells, including mammalian T-cells or APCs, can be used in the preparing the polypeptides or engineered cells. The selection of a cell is dependent upon a number of factors recognized by the art. These include, for example, compatibility with the chosen expression vector, toxicity of the peptides encoded by the DNA molecule, rate of transformation, ease of recovery of the peptides, expression characteristics, biosafety and costs. A balance of these factors must be struck with the understanding that not all cells can be equally effective for the expression of a particular DNA sequence.

[0551] In some embodiments, the host cell is a mammalian cell. Examples of suitable mammalian host cells include African green monkey kidney cells (Vero; ATCC CRL 1587), human embryonic kidney cells (293-HEK; ATCC CRL 1573), baby hamster kidney cells (BHK-21, BHK-570; ATCC CRL 8544, ATCC CRL 10314), canine kidney cells (MDCK; ATCC CCL 34), Chinese hamster ovary cells (CHO-K1; ATCC CCL61; CHO DG44 (Chasin et al, Som. Cell. Molec. Genet. 12:555, 1986)), rat pituitary cells (GH1; ATCC CCL82), HeLa S3 cells (ATCC CCL2.2), rat hepatoma cells (H-4-II-E; ATCC CRL 1548) SV40-transformed monkey kidney cells (COS-1; ATCC CRL 1650) and murine embryonic cells (NIH-3T3; ATCC CRL 1658).

[0552] In some embodiments, the host cells can be a variety of eukaryotic cells, such as in yeast cells, or with mammalian cells such as Chinese hamster ovary (CHO) or HEK293 cells. In some embodiments, the host cell is a suspension cell and the polypeptide is engineered or produced in cultured suspension, such as in cultured suspension CHO cells, e.g. CHO-S cells. In some examples, the cell line is a CHO cell line that is deficient in DHFR (DHFR-), such as DG44 and DUXB11. In some embodiments, the cell is deficient in glutamine synthase (GS), e.g. CHO-S cells, CHOK1 SV cells, and CHOZN((R)) GS−/−cells. In some embodiments, the CHO cells, such as suspension CHO cells, may be CHO—S-2H2 cells, CHO—S-clone 14 cells, or ExpiCHO-S cells.

[0553] In some embodiments, host cells can also be prokaryotic cells, such as with E. coli. The transformed recombinant host is cultured under polypeptide expressing conditions, and then purified to obtain a soluble protein. Recombinant host cells can be cultured under conventional fermentation conditions so that the desired polypeptides are expressed. Such fermentation conditions are well known in the art. Finally, the polypeptides provided herein can be recovered and purified from recombinant cell cultures by any of a number of methods well known in the art, including ammonium sulfate or ethanol precipitation, acid extraction, anion or cation exchange chromatography, phosphocellulose chromatography, hydrophobic interaction chromatography, and affinity chromatography. Protein refolding steps can be used, as desired, in completing configuration of the mature protein. Finally, high performance liquid chromatography (HPLC) can be employed in the final purification steps.

[0554] In some embodiments, the recombinant vector is a viral vector. Exemplary recombinant viral vectors include a lentiviral vector genome, poxvirus vector genome, vaccinia virus vector genome, adenovirus vector genome, adenovirus-associated virus vector genome, herpes virus vector genome, and alpha virus vector genome. Viral vectors can be live, attenuated, replication conditional or replication deficient, non-pathogenic (defective), replication competent viral vector, and/or is modified to express a heterologous gene product, e.g., the variant immunomodulatory polypeptides provided herein. Vectors for generation of viruses also can be modified to alter attenuation of the virus, which includes any method of increasing or decreasing the transcriptional or translational load.

[0555] Exemplary viral vectors that can be used include modified vaccinia virus vectors (see, e.g., Guerra et al., J. Virol. 80:985-98 (2006); Tartaglia et al., AIDS Research and Human Retroviruses 8: 1445-47 (1992); Gheradi et al., J. Gen. Virol. 86:2925-36 (2005); Mayr et al., Infection 3:6-14 (1975); Hu et al., J. Virol. 75: 10300-308 (2001); U.S. Pat. Nos. 5,698,530, 6,998,252, 5,443,964, 7,247,615 and 7,368,116); adenovirus vector or adenovirus-associated virus vectors (see, e.g., Molin et al., J. Virol. 72:8358-61 (1998); Narumi et al., Am J. Respir. Cell Mol. Biol. 19:936-41 (1998); Mercier et al., Proc. Natl. Acad. Sci. USA 101:6188-93 (2004); U.S. Pat. Nos. 6,143,290; 6,596,535; 6,855,317; 6,936,257; 7,125,717; 7,378,087; 7,550,296); retroviral vectors including those based upon murine leukemia virus (MuLV), gibbon ape leukemia virus (GaLV), ecotropic retroviruses, simian immunodeficiency virus (SIV), human immunodeficiency virus (HIV), and combinations (see, e.g., Buchscher et al., J. Virol. 66:2731-39 (1992); Johann et al., J. Virol. 66: 1635-40 (1992); Sommerfelt et al., Virology 176:58-59 (1990); Wilson et al., J. Virol. 63:2374-78 (1989); Miller et al., J. Virol. 65:2220-24 (1991); Miller et al., Mol. Cell Biol. 10:4239 (1990); Kolberg, NIH Res. 4:43 1992; Cornetta et al., Hum. Gene Ther. 2:215 (1991)); lentiviral vectors including those based upon Human Immunodeficiency Virus (HIV-1), HIV-2, feline immunodeficiency virus (FIV), equine infectious anemia virus, Simian Immunodeficiency Virus (SIV), and maedi/visna virus (see, e.g., Pfeifer et al., Annu. Rev. Genomics Hum. Genet. 2: 177-211 (2001); Zufferey et al., J. Virol. 72: 9873, 1998; Miyoshi et al., J. Virol. 72:8150, 1998; Philpott and Thrasher, Human Gene Therapy 18:483, 2007; Engelman et al., J. Virol. 69: 2729, 1995; Nightingale et al., Mol. Therapy, 13: 1121, 2006; Brown et al., J. Virol. 73:9011 (1999); WO 2009/076524; WO 2012/141984; WO 2016/011083; McWilliams et al., J. Virol. 77: 11150, 2003; Powell et al., J. Virol. 70:5288, 1996) or any, variants thereof, and/or vectors that can be used to generate any of the viruses described above. In some embodiments, the recombinant vector can include regulatory sequences, such as promoter or enhancer sequences, that can regulate the expression of the viral genome, such as in the case for RNA viruses, in the packaging cell line (see, e.g., U.S. Pat. Nos. 5,385,839 and 5,168,062).

[0556] In some aspects, nucleic acids or an expression vector comprises a nucleic acid sequence that encodes the immunomodulatory protein operatively linked to appropriate expression control sequences. Methods of effecting this operative linking, either before or after the nucleic acid sequence encoding the immunomodulatory protein is inserted into the vector, are well known. Expression control sequences include promoters, activators, enhancers, operators, ribosomal binding sites, start signals, stop signals, cap signals, polyadenylation signals, and other signals involved with the control of transcription or translation. The promoter can be operably linked to the portion of the nucleic acid sequence encoding the immunomodulatory protein.

[0557] Transcriptional regulatory sequences include a promoter region sufficient to direct the initiation of RNA synthesis. Suitable eukaryotic promoters include the promoter of the mouse metallothionein I gene (Hamer et al, J. Molec. Appl Genet. 1:273 (1982)), the TK promoter of Herpes virus (McKnight, Cell 31:355 (1982)), the SV40 early promoter (Benoist et al, Nature 290:304 (1981)), the Rous sarcoma virus promoter (Gorman et al, Proc. Nat'l Acad. Sci. USA 79:6777 (1982)), the cytomegalovirus promoter (Foecking et al, Gene 45:101 (1980)), and the mouse mammary tumor virus promoter (see, generally, Etcheverry, “Expression of Engineered Proteins in Mammalian Cell Culture,” in Protein Engineering: Principles and Practice, Cleland et al. (eds.), pages 163-181 (John Wiley & Sons, Inc. 1996)). One useful combination of a promoter and enhancer is provided by a myeloproliferative sarcoma virus promoter and a human cytomegalovirus enhancer.

[0558] Alternatively, a prokaryotic promoter, such as the bacteriophage T3 RNA polymerase promoter, can be used to control production of an immunomodulatory protein in mammalian cells if the prokaryotic promoter is regulated by a eukaryotic promoter (Zhou et al, Mol Cell. Biol. 10:4529 (1990), and Kaufman et al, Nucl. Acids Res. 19:4485 (1991)).

[0559] An expression vector can be introduced into host cells using a variety of standard techniques including calcium phosphate transfection, liposome-mediated transfection, microprojectile-mediated delivery, electroporation, and the like. The transfected cells can be selected and propagated to provide recombinant host cells that comprise the expression vector stably integrated in the host cell genome. Techniques for introducing vectors into eukaryotic cells and techniques for selecting such stable transformants using a dominant selectable marker are described, for example, by Ausubel (1995) and by Murray (ed.), Gene Transfer and Expression Protocols (Humana Press 1991).

[0560] For example, one suitable selectable marker is a gene that provides resistance to the antibiotic neomycin. In this case, selection is carried out in the presence of a neomycin-type drug, such as G-418 or the like. Selection systems can also be used to increase the expression level of the gene of interest, a process referred to as “amplification.” Amplification is carried out by culturing transfectants in the presence of a low level of the selective agent and then increasing the amount of selective agent to select for cells that produce high levels of the products of the introduced genes. A suitable amplifiable selectable marker is dihydrofolate reductase, which confers resistance to methotrexate. Other drug resistance genes (e.g., hygromycin resistance, multi-drug resistance, puromycin acetyltransferase) can also be used. Alternatively, markers that introduce an altered phenotype, such as green fluorescent protein, or cell surface proteins such as CD4, CD8, Class I MHC, placental alkaline phosphatase may be used to sort transfected cells from untransfected cells by such means as FACS sorting or magnetic bead separation technology.

[0561] In some embodiments, polypeptides provided herein can also be made by synthetic methods. Solid phase synthesis is the preferred technique of making individual peptides since it is the most cost-effective method of making small peptides. For example, well known solid phase synthesis techniques include the use of protecting groups, linkers, and solid phase supports, as well as specific protection and deprotection reaction conditions, linker cleavage conditions, use of scavengers, and other aspects of solid phase peptide synthesis. Peptides can then be assembled into the polypeptides as provided herein.

### V. Pharmaceutical Compositions

[0562] Provided herein are compositions containing any of the provided immunomodulatory proteins described herein. The pharmaceutical composition can further comprise a pharmaceutically acceptable excipient. For example, the pharmaceutical composition can contain one or more excipients for modifying, maintaining or preserving, for example, the pH, osmolarity, viscosity, clarity, color, isotonicity, odor, sterility, stability, rate of dissolution or release, adsorption, or penetration of the composition. Such compositions may comprise buffers such as neutral buffered saline, phosphate buffered saline and the like; carbohydrates such as glucose, mannose, sucrose or dextrans, mannitol; proteins; polypeptides or amino acids such as glycine; antioxidants; chelating agents such as EDTA or glutathione; adjuvants (e.g., aluminum hydroxide); and preservatives.

[0563] In some embodiments, the pharmaceutical composition is a solid, such as a powder, capsule, or tablet. For example, the components of the pharmaceutical composition can be lyophilized. In some embodiments, the solid pharmaceutical composition is reconstituted or dissolved in a liquid prior to administration.

[0564] In some embodiments, the pharmaceutical composition is a liquid, for example immunomodulatory proteins dissolved in an aqueous solution (such as physiological saline or Ringer's solution). In some embodiments, the pH of the pharmaceutical composition is between about 4.0 and about 8.5 (such as between about 4.0 and about 5.0, between about 4.5 and about 5.5, between about 5.0 and about 6.0, between about 5.5 and about 6.5, between about 6.0 and about 7.0, between about 6.5 and about 7.5, between about 7.0 and about 8.0, or between about 7.5 and about 8.5).

[0565] In some embodiments, the pharmaceutical composition comprises a pharmaceutically-acceptable excipient, for example a filler, binder, coating, preservative, lubricant, flavoring agent, sweetening agent, coloring agent, a solvent, a buffering agent, a chelating agent, or stabilizer. Examples of pharmaceutically-acceptable fillers include cellulose, dibasic calcium phosphate, calcium carbonate, microcrystalline cellulose, sucrose, lactose, glucose, mannitol, sorbitol, maltol, pregelatinized starch, corn starch, or potato starch. Examples of pharmaceutically-acceptable binders include polyvinylpyrrolidone, starch, lactose, xylitol, sorbitol, maltitol, gelatin, sucrose, polyethylene glycol, methyl cellulose, or cellulose. Examples of pharmaceutically-acceptable coatings include hydroxypropyl methylcellulose (HPMC), shellac, corn protein zein, or gelatin. Examples of pharmaceutically-acceptable disintegrants include polyvinylpyrrolidone, carboxymethyl cellulose, or sodium starch glycolate. Examples of pharmaceutically-acceptable lubricants include polyethylene glycol, magnesium stearate, or stearic acid. Examples of pharmaceutically-acceptable preservatives include methyl parabens, ethyl parabens, propyl paraben, benzoic acid, or sorbic acid. Examples of pharmaceutically-acceptable sweetening agents include sucrose, saccharine, aspartame, or sorbitol. Examples of pharmaceutically-acceptable buffering agents include carbonates, citrates, gluconates, acetates, phosphates, or tartrates.

[0566] In some embodiments, the pharmaceutical composition further comprises an agent for the controlled or sustained release of the product, such as injectable microspheres, bio-erodible particles, polymeric compounds (polylactic acid, polyglycolic acid), beads, or liposomes.

[0567] In some embodiments, the pharmaceutical composition is sterile. Sterilization may be accomplished by filtration through sterile filtration membranes or radiation. Where the composition is lyophilized, sterilization using this method may be conducted either prior to or following lyophilization and reconstitution. The composition for parenteral administration may be stored in lyophilized form or in solution. In addition, parenteral compositions generally are placed into a container having a sterile access port, for example, an intravenous solution bag or vial having a stopper pierceable by a hypodermic injection needle.

[0568] A pharmaceutically acceptable carrier may be a pharmaceutically acceptable material, composition, or vehicle. For example, the carrier may be a liquid or solid filler, diluent, excipient, solvent, or encapsulating material, or some combination thereof. Each component of the carrier must be “pharmaceutically acceptable” in that it must be compatible with the other ingredients of the formulation. It also must be suitable for contact with any tissue, organ, or portion of the body that it may encounter, meaning that it must not carry a risk of toxicity, irritation, allergic response, immunogenicity, or any other complication that excessively outweighs its therapeutic benefits.

[0569] In some embodiments, the pharmaceutical composition is administered to a subject. Generally, dosages and routes of administration of the pharmaceutical composition are determined according to the size and condition of the subject, according to standard pharmaceutical practice. For example, the therapeutically effective dose can be estimated initially either in cell culture assays or in animal models such as mice, rats, rabbits, dogs, pigs, or monkeys. An animal model may also be used to determine the appropriate concentration range and route of administration. Such information can then be used to determine useful doses and routes for administration in humans. The exact dosage will be determined in light of factors related to the subject requiring treatment. Dosage and administration are adjusted to provide sufficient levels of the active compound or to maintain the desired effect. Factors that may be taken into account include the severity of the disease state, the general health of the subject, the age, weight, and gender of the subject, time and frequency of administration, drug combination(s), reaction sensitivities, and response to therapy.

[0570] Long-acting pharmaceutical compositions may be administered every 3 to 4 days, every week, or biweekly depending on the half-life and clearance rate of the particular formulation. The frequency of dosing will depend upon the pharmacokinetic parameters of the molecule in the formulation used. Typically, a composition is administered until a dosage is reached that achieves the desired effect. The composition may therefore be administered as a single dose, or as multiple doses (at the same or different concentrations/dosages) over time, or as a continuous infusion. Further refinement of the appropriate dosage is routinely made. Appropriate dosages may be ascertained through use of appropriate dose-response data.

[0571] In some embodiments, the pharmaceutical composition is administered to a subject through any route, including orally, transdermally, by inhalation, intravenously, intra-arterially, intramuscularly, direct application to a wound site, application to a surgical site, intraperitoneally, by suppository, subcutaneously, intradermally, transcutaneously, by nebulization, intrapleurally, intraventricularly, intra-articularly, intraocularly, or intraspinally.

[0572] A provided pharmaceutical formulation may, for example, be in a form suitable for intravenous infusion.

[0573] In some embodiments, the dosage ofthe pharmaceutical composition is a single dose or a repeated dose. In some embodiments, the doses are given to a subject once per day, twice per day, three times per day, or four or more times per day. In some embodiments, about 1 or more (such as about 2 or more, about 3 or more, about 4 or more, about 5 or more, about 6 or more, or about 7 or more) doses are given in a week. In some embodiments, multiple doses are given over the course of days, weeks, months, or years. In some embodiments, a course of treatment is about 1 or more doses (such as about 2 or more does, about 3 or more doses, about 4 or more doses, about 5 or more doses, about 7 or more doses, about 10 or more doses, about 15 or more doses, about 25 or more doses, about 40 or more doses, about 50 or more doses, or about 100 or more doses).

[0574] In some embodiments, an administered dose of the pharmaceutical composition is about 1 pg of protein per kg subject body mass or more (such as about 2 pg of protein per kg subject body mass or more, about 5 pg of protein per kg subject body mass or more, about 10 pg of protein per kg subject body mass or more, about 25 μg of protein per kg subject body mass or more, about 50 μg of protein per kg subject body mass or more, about 100 μg of protein per kg subject body mass or more, about 250 μg of protein per kg subject body mass or more, about 500 μg of protein per kg subject body mass or more, about 1 mg of protein per kg subject body mass or more, about 2 mg of protein per kg subject body mass or more, or about 5 mg of protein per kg subject body mass or more).

### VI. Methods for Assessing Activity and Immune Modulation of Immunomodulatory Proteins

[0575] In some embodiments, the provided immunomodulatory proteins, such as BCMA fusion proteins or multi-domain immunomodulatory proteins provided herein, exhibit immunomodulatory activity. The provided immunodulatory proteins, such as BCMA fusion proteins or multi-domain immunomodulatory proteins, can modulate B cell activity, such as one or more of B cell proliferation, differentiation or survival. In some cases, the provided immunomodulatory proteins, such as multi-domain immunomodulatory proteins, may additionally modulate T cell activation or response. In some embodiments, T cell activation or response is reduced, decreased or attenuated.

[0576] The function of immunomodulatory proteins can be examined using a variety of approaches to assess the ability of the proteins to bind to cognate binding partners. For example, BCMA fusion proteins may be assessed for binding to APRIL or BAFF. In the case of multidomain immunomodulatory proteins herein the proteins may be assessed for binding to the cognate binding partner, such as a ligand of a T cell stimulatory receptor (e.g. CD80 or CD86) or directly to a T cell stimulatory receptor (e.g. CD28), and/or to a ligand of a B cell stimulatory receptor (e.g. APRIL or BAFF). A variety of assays are known for assessing binding affinity and/or determining whether a binding molecule (e.g., immunomodulatory protein) specifically binds to a particular binding partner. It is within the level of a skilled artisan to determine the binding affinity of a binding molecule, e.g., immumodulaotry protein, for a binding partner, e.g., APRIL or BAFF, such as by using any of a number of binding assays that are well known in the art. Various binding assays are known and include, but are not limited to, for example, ELISA K_{D}, KinExA, flow cytometry, and/or surface plasmon resonance devices), including those described herein. Such methods include, but are not limited to, methods involving BIAcore®, Octet®, or flow cytometry. For example, in some embodiments, a BIAcore® instrument can be used to determine the binding kinetics and constants of a complex between two proteins using surface plasmon resonance (SPR) analysis (see, e.g., Scatchard et al., Ann. N.Y. Acad. Sci. 51:660, 1949; Wilson, Science 295:2103, 2002; Wolff et al., Cancer Res. 53:2560, 1993; and U.S. Pat. Nos. 5,283,173, 5,468,614, or the equivalent). SPR measures changes in the concentration of molecules at a sensor surface as molecules bind to or dissociate from the surface. The change in the SPR signal is directly proportional to the change in mass concentration close to the surface, thereby allowing measurement of binding kinetics between two molecules. The dissociation constant for the complex can be determined by monitoring changes in the refractive index with respect to time as buffer is passed over the chip. Other suitable assays for measuring the binding of one protein to another include, for example, immunoassays such as enzyme linked immunosorbent assays (ELISA) and radioimmunoassays (RIA), or determination of binding by monitoring the change in the spectroscopic or optical properties of the proteins through fluorescence, UV absorption, circular dichroism, or nuclear magnetic resonance (NMR). Other exemplary assays include, but are not limited to, Western blot, ELISA, analytical ultracentrifugation, spectroscopy, flow cytometry, sequencing and other methods for detection of expressed polynucleotides or binding of proteins.

[0577] Provided immunomodulatory proteins also can be assessed in any of a variety of assess to assess modulation of T cell or B cell activity. One such assay is a cell proliferation assay. Cells are cultured in the presence or absence of a test compound (e.g. immunomodulatory protein), and cell proliferation is detected by, for example, measuring incorporation of tritiated thymidine or by colorimetric assay based on the metabolic breakdown of 3-(4,5-dimethylthiazol-2-yl)-2,5-diphenyl tetrazolium bromide (MTT) (Mosman, J. Immunol. Meth. 65: 55-63, 1983). An alternative assay format uses cells that are further engineered to express a reporter gene. The reporter gene is linked to a promoter element that is responsive to the receptor-linked pathway, and the assay detects activation of transcription of the reporter gene. Numerous reporter genes that are easily assayed for in cell extracts are known in the art, for example, the E. coli lacZ, chloroamphenicol acetyl transferase (CAT) and serum response element (SRE) (see, e.g., Shaw et al., Cell 56:563-72, 1989). An exemplary reporter gene is a luciferase gene (de Wet et al., Mol. Cell. Biol. 7:725, 1987). Expression of the luciferase gene is detected by luminescence using methods known in the art (e.g., Baumgartner et al., J. Biol. Chem. 269:29094-101, 1994; Schenborn and Goiffin, Promega Notes 41:11, 1993). Luciferase activity assay kits are commercially available from, for example, Promega Corp., Madison, Wis.

[0578] Provided immunomodulatory proteins can be characterized by the ability to inhibit the stimulation of human B cells by soluble APRIL or BAFF, as described by Gross et al, international publication No. WO00/40716. Briefly, human B cells are isolated from peripheral blood mononuclear cells, such as using CD19 magnetic beads separation (e.g. Miltenyi Biotec Auburn, Calif.). The purified B cells can be incubated under conditions of stimulation, e.g. in the presence of soluble APRIL, and further in the presence of titrated concentration of immunomodulatory protein. The B cells can be labeled with a proliferation dye or can be labeled with 1 μCi ³H-thymidine to measure proliferation. The number of B cells can be determined over time.

[0579] Reporter cell lines that express a reporter gene under the operable control of a transcription factor, such as NF-κB, NFAT-1 and AP-1, can be made that express TACI or BCMA. For example, the reporter cell can include Jurkat and other B Lymphoma cell lines. Incubation of these cells with soluble BAFF or APRIL ligands signal through the reporter genes in these constructs. The effect of provided immunomodulatory proteins to modulate this signaling can be assessed.

[0580] Well established animal models are available to test in vivo efficacy of provided immunomodulatory proteins in certain disease states, including those involving autoimmune or inflammatory conditions. For example, animal models of autoimmune disease include, for example, MRL-1pr/1pr or NZB×NZW F1 congenic mouse strains which serve as a model of SLE (systemic lupus erythematosus). Such animal models are known in the art, see for example Autoimmune Disease Models A Guidebook, Cohen and Miller eds. Academic Press. Offspring of a cross between New Zealand Black (NZB) and New Zealand White (NZW) mice develop a spontaneous form of SLE that closely resembles SLE in humans. The offspring mice, known as NZBW begin to develop IgM autoantibodies against T-cells at 1 month of age, and by 5-7 months of age, Ig anti-DNA autoantibodies are the dominant immunoglobulin. Polyclonal B-cell hyperactivity leads to overproduction of autoantibodies. The deposition of these autoantibodies, particularly ones directed against single stranded DNA is associated with the development of glomerulonephritis, which manifests clinically as proteinuria, azotemia, and death from renal failure. Kidney failure is the leading cause of death in mice affected with spontaneous SLE, and in the NZBW strain, this process is chronic and obliterative. The disease is more rapid and severe in females than males, with mean survival of only 245 days as compared to 406 days for the males. While many of the female mice will be symptomatic (proteinuria) by 7-9 months of age, some can be much younger or older when they develop symptoms. The fatal immune nephritis seen in the NZBW mice is very similar to the glomerulonephritis seen in human SLE, making this spontaneous murine model very attractive for testing of potential SLE therapeutics (Putterman and Naparstek, Murine Models of Spontaneous Systemic Lupus Erythematosus, Autoimmune Disease Models: A Guidebook, chapter 14, pp. 217-34, 1994; Mohan et al., J. Immunol. 154:1470-80, 1995; and Daikh et al., J. Immunol. 159:3104-08, 1997). Administration of provided immunomodulatory proteins to these mice to evaluate the efficacy to ameliorate symptoms and alterations to the course of disease can be assessed.

[0581] Another mouse model of inflammation and lupus-like disease is the bm12 inducible mouse model of SLE (Klarquist and Janssen, 2015. J. Vis. Exp. (105), e53319). Splenocyte suspensions from female I-A^{bm12}B6(C)-H2-Ab1^{bm12}/KhEgJ (‘bm12’) mice are adoptively transferred into female C57BL/6NJ recipient mice. H2-Ab1^{bm12} differs from H2-Ab1^{b} by 3 nucleotides, resulting in alteration of 3 amino acids in the p-chain of the MHC class II I-A molecule. Alloactivation of donor bm12 CD4+ T cells by recipient antigen presenting cells leads to chronic GVHD with symptoms closely resembling SLE, including autoantibody production, changes in immune cell subsets, and mild kidney disease. Glomerulonephritis with immune complex deposition develops late in the model, largely comprised of autoantigens bound to IgG1, IgG2b, IgG2c, and IgG3 antibodies. Endpoints of this model may include concentrations of anti-dsDNA antibodies, select IgG isotypes, blood urea nitrogen (BUN), and creatinine in serum, immune cell subset composition in the spleen and cervical LN, and kidney histology.

[0582] In some embodiments, mouse models for Sjögren's syndrome (SjS) can be used. The SjS disease, as well as an accelerated onset of diabetes, can be induced in female diabetes-prone non-obese diabetic (NOD) mice using repeat dosing with anti-mouse (m) PD-L1 antibody, based on a modified version of a protocol published by Zhou et al., 2016 Sci. Rep. 6, 39105. Starting at 6 weeks of age, mice are injected intraperitoneally (IP) on Study Days 0, 2, 4, and 6 with 100 μg of anti-PD-L1 antibody and are treated on various days with provided immunomodulatory proteins. Naïve mice are included as controls for the endpoint analyses. All mice are typically terminated on Study Day 10 and submandibular glands (SMG) and the pancreas from each mouse are collected for histopathology evaluation to assess for signs and severity of sialadenitis and insulitis. Blood glucose levels can be measured on various days.

[0583] In some embodiments, mouse models for experimental allergic encephalomyelitis (EAE) can be used. The models resemble human multiple sclerosis, and produces demyelination as a result of T-cell activation to neuroproteins such as myelin basic protein (MBP), or proteolipid protein (PLP). Inoculation with antigen leads to induction of CD4+, class II MHC-restricted T-cells (Thl). Changes in the protocol for EAE can produce acute, chronic-relapsing, or passive-transfer variants of the model (Weinberg et al., J. Immunol. 162:1818-26, 1999; Mijaba et al., Cell. Immunol. 186:94-102, 1999; and Glabinski, Meth. Enzym. 288:182-90, 1997). Administration of provided immunomodulatory proteins to ameliorate symptoms and alterations to the course of disease can be assessed.

[0584] In some embodiments, a collagen-induced arthritis (CIA) model can be used in which mice develop chronic inflammatory arthritis which closely resembles human rheumatoid arthritis (RA). Since CIA shares similar immunological and pathological features with RA, this makes it an ideal model for screening potential human anti-inflammatory compounds. Another advantage in using the CIA model is that the mechanisms of pathogenesis are known. The T and B cell epitopes on type II collagen have been identified, and various immunological (delayed-type hypersensitivity and anti-collagen antibody) and inflammatory (cytokines, chemokines, and matrix-degrading enzymes) parameters relating to immune-mediating arthritis have been determined, and can be used to assess test compound efficacy in the models (Wooley, Curr. Opin. Rheum. 3:407-20, 1999; Williams et al., Immunol. 89:9784-788, 1992; Myers et al., Life Sci. 61:1861-78, 1997; and Wang et al., Immunol. 92:8955-959, 1995). Administration of provided immunomodulatory proteins to ameliorate symptoms and alterations to the course of disease can be assessed.

[0585] In some embodiments, models for bronchial infection, such as asthma, can be created when mice are injected with ovalbumin and restimulated nasally with antigen which produces an asthmatic response in the bronchi similar to asthma. Administration of provided immunomodulatory proteins to ameliorate symptoms and alterations to the course of disease can be assessed.

[0586] In some embodiments, myasthenia gravis (MG) is another autoimmune disease for which murine models are available. MG is a disorder of neuromuscular transmission involving the production of autoantibodies directed against the nicotinic acetylcholine receptor (AChR). MG is acquired or inherited with clinical features including abnormal weakness and fatigue on exertion. A mouse model of MG has been established. (Christadoss et al., Establishment of a Mouse Model of Myasthenia Gravis Which Mimics Human Myasthenia Gravis Pathogenesis for Immune Intervention, in Immunobiology of Proteins and Peptides VIII, Atassi and Bixler, eds., 1995, pp. 195-99.) Experimental autoimmune myasthenia gravis (EAMG) is an antibody mediated disease characterized by the presence of antibodies to AChR. These antibodies destroy the receptor leading to defective neuromuscular electrical impulses, resulting in muscle weakness. In the EAMG model, mice are immunized with the nicotinic acetylcholine receptor. Clinical signs of MG become evident weeks after the second immunization. EAMG is evaluated by several methods including measuring serum levels of AChR antibodies by radioimmunoassay (Christadoss and Dauphinee, J Immunol. 136:2437-40, 1986; and Lindstrom et al., Methods Enzymol. 74:432-60, 1981), measuring muscle AChR, or electromyography (Wu et al. Protocols in Immunology. Vol. 3, Eds. Coligen, Kruisbeak, Margulies, Shevach, and Strober. John Wiley and Sons, New York, p. 15.8.1, 1997).

[0587] Another use for in vivo models includes delivery of an antigen challenge to the animal followed by administration of immunomodulatory proteins and measuring the T and B cell response. T cell dependent and T cell independent immune response can be measured as described in Perez-Melgosa et al., J. Immunol. 163:1123-7, 1999. Immune response in animals subjected to a regular antigen challenge (for example, keyhole limpet hemacyanin (KLH), sheep red blood cells (SRBC), ovalbumin or collagen) followed by administration of provided immunomodulatory proteins can be done to measure effect on B cell response.

[0588] Pharmacokinetic studies can be used in association with radiolabeled immunomodulatory proteins to determine the distribution and half life of such polypeptides in vivo.

[0589] Assays to assess activity on T cell responses also can be assessed. T cell activation assays can be employed in which IFN-gamma or other effector cytokine is measured. The immunomodulatory proteins can be assessed for their ability to suppress or decrease effector cytokine secretion following T cell activation. Assays for determining enhancement or suppression of immunological activity include MLR (mixed lymphocyte reaction) assays measuring interferon-gamma cytokine levels in culture supernatants (Wang et al., Cancer Immunol Res. 2014 September: 2(9):846-56), SEB (staphylococcal enterotoxin B), T cell stimulation assays (Wang et al., Cancer Immunol Res. 2014 September: 2(9):846-56), and anti-CD3 T cell stimulation assays (Li and Kurlander, J Transl Med. 2010: 8: 104). Since T cell activation is associated with secretion of IFN-gamma cytokine, detecting IFN-gamma levels in culture supernatants from these in vitro human T cell assays can be assayed using commercial ELISA kits (Wu et al, Immunol Lett 2008 Apr. 15; 117(1): 57-62). Assays also include assays to assess cytotoxicity, including a standard 51Cr-release assay (see e.g. Milone et al., (2009) Molecular Therapy 17: 1453-1464) or flow based cytotoxicity assays, or an impedance based cytotoxicity assay (Peper et al. (2014) Journal of Immunological Methods, 405:192-198). In some embodiments, the assay used is anti-CD3 coimmobilization assay. In this assay, primary T cells are stimulated by anti-CD3 immobilized with or without additional recombinant proteins. Culture supernatants are harvested at timepoints, usually 24-72 hours. In another embodiment, the assay used is a mixed lymphocyte reaction (MLR). In this assay, primary T cells are simulated with allogenic APC. Culture supernatants are harvested at timepoints, usually 24-72 hours. Human IFN-gamma levels are measured in culture supernatants by standard ELISA techniques. In some cases, commercial kits are available from vendors and the assay can be performed according to manufacturer's recommendation.

[0590] In some embodiments, in assaying for the ability of an immunomodulatory protein to modulate, e.g. increase or decrease IFN-gamma expression, a T cell reporter assay can be used. In some embodiments, the T cell is a Jurkat T cell line or is derived from Jurkat T cell lines. In reporter assays, the reporter cell line (e.g. Jurkat reporter cell) also is generated to overexpress a receptor that is the cognate binding partner of the immunomodulatory protein. In some embodiments, the reporter T cells also contain a reporter construct containing an inducible promoter responsive to T cell activation operably linked to a reporter. In some embodiments, the reporter is a fluorescent or luminescent reporter. In some embodiments, the reporter is luciferase. In some embodiments, the promoter is responsive to CD3 signaling. In some embodiments, the promoter is an NFAT promoter. In some embodiments, the promoter is responsive to costimulatory signaling, e.g. CD28 costimulatory signaling. In some embodiments, the promoter is an IL-2 promoter. In aspects of a reporter assay, a reporter cell line is stimulated, such as by co-incubation with antigen presenting cells (APCs) expressing the wild-type ligand of a T cell costimulatory receptor. In some embodiments, the APCs are artificial APCs. Artificial APCs are well known to a skilled artisan. In some embodiments, artificial APCs are derived from one or more mammalian cell line, such as K562, CHO or 293 cells.

### VII. Therapeutic Applications

[0591] The pharmaceutical compositions described herein (including pharmaceutical composition comprising the immunomodulatory protein described herein) can be used in a variety of therapeutic applications, such as the treatment of a disease. For example, in some embodiments the pharmaceutical composition is used to treat inflammatory or autoimmune disorders, cancer, organ transplantation, viral infections, and/or bacterial infections in a mammal. The pharmaceutical composition can modulate (e.g. decrease) an immune response to treat the disease.

[0592] Such methods and uses include therapeutic methods and uses, for example, involving administration of the molecules or compositions containing the same, to a subject having a disease, condition, or disorder. In some cases, such as described, the disease or disorder is an autoimmune or inflammatory disease, condition or disorder. In some embodiments, the molecule or engineered cell is administered in an effective amount to effect treatment of the disease, condition or disorder. Uses include uses of molecules containing an immunomodulatory protein, and in the preparation of a medicament in order to carry out such therapeutic methods. In some embodiments, the methods are carried out by administering a provided immunomodulatory protein, or compositions comprising the same, to the subject having or suspected of having the disease or condition. In some embodiments, the methods thereby treat the disease or condition or disorder in the subject.

[0593] Illustrative subjects include mammalian subjects, such as farm animals, domestic animals, and human patients. In particular embodiments, the subject is a human subject.

[0594] The pharmaceutical compositions described herein can be used in a variety of therapeutic applications, such as the treatment of a disease. For example, in some embodiments the pharmaceutical composition is used to treat inflammatory or autoimmune disorders, organ transplantation, viral infections, and/or bacterial infections in a mammal. The pharmaceutical composition can modulate an immune response to treat the disease. In some embodiments, the pharmaceutical composition suppresses an immune response, which can be useful in the treatment of inflammatory or autoimmune disorders, or organ transplantation.

[0595] The provided methods are believed to have utility in a variety of applications, including, but not limited to, e.g., in prophylactic or therapeutic methods for treating a variety of immune system diseases or conditions in a mammal in which modulation or regulation of the immune system and immune system responses is beneficial. For example, suppressing an immune response can be beneficial in prophylactic and/or therapeutic methods for inhibiting rejection of a tissue, cell, or organ transplant from a donor by a recipient. In a therapeutic context, the mammalian subject is typically one with an immune system disease or condition, and administration is conducted to prevent further progression of the disease or condition.

[0596] The provided immunomodulatory proteins, including BCMA fusion proteins and multi-domain immunomodulatory proteins, can be used for the treatment of autoimmune diseases, B cell cancers, immunomodulation, EBD and any antibody-mediated pathologies (e.g., ITCP, myasthenia gravis and the like), renal diseases, indirect T cell immune response, graft rejection, and graft versus host disease. Administration of the immunomodulatory proteins can specifically regulate B cell responses during the immune response. Additionally, administration of provided immunomodulatory proteins can be used to modulate B cell development, development of other cells, antibody production, and cytokine production. Administration or use of provided immunomodulatory proteins can also modulate T and B cell communication, such as by neutralizing the proliferative effects of BAFF or APRIL alone or, in the case of provided multi-domain immunomodulatory proteins also by neutralizing proliferative effects mediated by T cell stimulatory molecules such as by neutralizing the proliferative effects of CD80/CD86 on CD28.

[0597] In some embodiments, the pharmaceutical composition suppresses an immune response, which can be useful in the treatment of inflammatory or autoimmune disorders, or organ transplantation. In some embodiments, the pharmaceutical composition contains an immunomodulatory proteins that exhibits antagonist activity of a B cell stimulatory receptor and/or T cell stimulatory receptor, thereby decreasing or reducing an immune response.

[0598] In some embodiments, the compositions can be used to treat an autoimmune disease. In some embodiments, the administration of a therapeutic composition containing an immunomodulatory protein provided herein to a subject suffering from an immune system disease (e.g., autoimmune disease) can result in suppression or inhibition of such immune system attack or biological responses associated therewith. By suppressing this immune system attack on healthy body tissues, the resulting physical symptoms (e.g., pain, joint inflammation, joint swelling or tenderness) resulting from or associated with such attack on healthy tissues can be decreased or alleviated, and the biological and physical damage resulting from or associated with the immune system attack can be decreased, retarded, or stopped. In a prophylactic context, the subject may be one with, susceptible to, or believed to present an immune system disease, disorder or condition, and administration is typically conducted to prevent progression of the disease, disorder or condition, inhibit or alleviate symptoms, signs, or biological responses associated therewith, prevent bodily damage potentially resulting therefrom, and/or maintain or improve the subject's physical functioning.

[0599] In some embodiments, the disease or conditions that can be treated by the pharmaceutical composition described herein is any disease mediated by immune complex deposition (e.g. lupus nephritis, vasculitis); direct interference with a pathway (e.g. catastrophic antiphospholipid antibody syndrome, myasthenia gravis crisis; anti-Jo-1 disease); opsonization or direct damage to cells (e.g. Idiopathic thrombocytopenic purpura, autoimmune hemolytic anemia); antibody-mediated rejection of an allograft (e.g. highly-sensitized renal transplant patients); or anti-drug antibodies to biologic replacement factors, vectors (e.g. anti-Factor 8).

[0600] In some embodiments, the inflammatory and autoimmune disorders that can be treated by the pharmaceutical composition described herein is Systemic lupus erythematosus (SLE), including flare prevention without glucocorticoids; Sjögren's syndrome; Primary biliary cirrhosis (PBC); Systemic scleroderma; Polymyositis; Diabetes prevention; IgA nephropathy; IgA vasculitis; B cell cancers, for example myeloma; Multiple sclerosis or Optic neuritis.

[0601] In some embodiments, the provided immunomodulatory proteins can be used to treat pre-B or B-cell leukemias, such as plasma cell leukemia, chronic or acute lymphocytic leukemia, myelomas such as multiple myeloma, plasma cell myeloma, endothelial myeloma and giant cell myeloma, and lymphomas such as non-Hodgkins lymphoma.

[0602] In some embodiments, the provided immunomodulatory proteins can be used as immunosuppressants to selectively block the action of B-lymphocytes for use in treating disease. For example, certain autoimmune diseases are characterized by production of autoantibodies, which contribute to tissue destruction and exacerbation of disease. Autoantibodies can also lead to the occurrence of immune complex deposition complications and lead to many symptoms of systemic lupus erythematosus, including kidney failure, neuralgic symptoms and death. Modulating antibody production independent of cellular response would also be beneficial in many disease states. B cells have also been shown to play a role in the secretion of arthritogenic immunoglobulins in rheumatoid arthritis. Methods and uses of the provided immunomodulatory proteins to inhibit, block or neutralize action of B cell cells to thereby suppress antibody production would be beneficial in treatment of autoimmune diseases such as myasthenia gravis, rheumatoid arthritis, polyarticular-course juvenile rheumatoid arthritis, and psoriatic arthritis.

[0603] In some embodiments, the provided immunomodulatory proteins can be used to block or neutralize the actions of B-cells in association with end stage renal diseases, which may or may not be associated with autoimmune diseases. Such methods would also be useful for treating immunologic renal diseases. Such methods would be useful for treating glomerulonephritis associated with diseases such as membranous nephropathy, IgA nephropathy or Berger's Disease, IgM nephropathy, IgA Vasculitis, Goodpasture's Disease, post-infectious glomerulonephritis, mesangioproliferative disease, chronic lymphoid leukemia, minimal-change nephrotic syndrome. Such methods would also serve as therapeutic applications for treating secondary glomerulonephritis or vasculitis associated with such diseases as lupus, polyarteritis, Henoch-Schonlein, Scleroderma, HTV-related diseases, amyloidosis or hemolytic uremic syndrome. The provided methods would also be useful as part of a therapeutic application for treating interstitial nephritis or pyelonephritis associated with chronic pyelonephritis, analgesic abuse, nephrocalcinosis, nephropathy caused by other agents, nephrolithiasis, or chronic or acute interstitial nephritis. The methods provided herein also include use of the provided immunomodulatory proteins in the treatment of hypertensive or large vessel diseases, including renal artery stenosis or occlusion and cholesterol emboli or renal emboli. The provided methods and uses also can be used for treatment of renal or urological neoplasms, multiple myelomas, lymphomas, light chain neuropathy or amyloidosis.

[0604] In some embodiments, the provided immunomodulatory proteins also can be used for the treatment of asthma and other chronic airway diseases such as bronchitis and emphysema. The provided immunomodulatory proteins can also be used to treat Sjögren's Syndrome.

[0605] In some embodiments, methods and uses of the provided immunomodulatory proteins include immunosuppression, in particular for such therapeutic use as for graft-versus-host disease and graft rejection. In some embodiments, methods and uses of the provided immunomodulatory proteins include treatment of such autoimmune diseases as insulin dependent diabetes mellitus (IDDM) and Crohn's Disease. Methods provided herein would have additional therapeutic value for treating chronic inflammatory diseases, in particular to lessen joint pain, swelling, anemia and other associated symptoms as well as treating septic shock.

[0606] In some embodiments, the inflammatory and autoimmune disorders that can be treated by a pharmaceutical composition containing an immunomodulatory protein described herein include, but are not limited to, Achalasia; Addison's disease; Adult Still's disease; Agammaglobulinemia; Alopecia areata; Amyloidosis; Ankylosing spondylitis; Anti-GBM/Anti-TBM nephritis; Antiphospholipid syndrome; Autoimmune adrenalitis (Addison's disease); Autoimmune angioedema; Autoimmune dysautonomia; Autoimmune encephalomyelitis; Autoimmune hepatitis; Autoimmune inner ear disease (AIED); Autoimmune myocarditis; Autoimmune oophoritis; Autoimmune orchitis; Autoimmune pancreatitis; Autoimmune polyglandular syndrome type II (APS II); Autoimmune retinopathy; Autoimmune thyroid disease (AITD), i.e. Hashimoto's disease; Autoimmune urticarial; Axonal & neuronal neuropathy (AMAN); Baló disease; Behcet's disease; Benign mucosal pemphigoid; Bullous pemphigoid; Castleman disease (CD); Celiac disease; Chagas disease; Chronic inflammatory demyelinating polyneuropathy (CIDP); Chronic recurrent multifocal osteomyelitis (CRMO); Churg-Strauss Syndrome (CSS) or Eosinophilic Granulomatosis (EGPA); Cicatricial pemphigoid; Cogan's syndrome; Cold agglutinin disease; Congenital heart block; Coxsackie myocarditis; CREST syndrome; Crohn's disease; Dermatitis herpetiformis; Dermatomyositis; Devic's disease (neuromyelitis optica); Discoid lupus; Dressler's syndrome; Endometriosis; Eosinophilic esophagitis (EoE); Eosinophilic fasciitis; Erythema nodosum; Essential mixed cryoglobulinemia; Evans syndrome; Fibromyalgia; Fibrosing alveolitis; Giant cell arteritis (temporal arteritis); Giant cell myocarditis; Glomerulonephritis; Goodpasture's syndrome; Granulomatosis with Polyangiitis; Graves' disease; Guillain-Barre syndrome; Hashimoto's thyroiditis; Hemolytic anemia; Henoch-Schonlein purpura (HSP); Herpes gestationis or pemphigoid gestationis (PG); Hidradenitis Suppurativa (HS) (Acne Inversa); Hypogammalglobulinemia; IgA Nephropathy; IgA Vasculitis; IgG4-related sclerosing disease; Immune thrombocytopenic purpura (ITP); Inclusion body myositis (IBM); Interstitial cystitis (IC); Juvenile arthritis; Juvenile diabetes (Type 1 diabetes); Juvenile myositis (JM); Kawasaki disease; Lambert-Eaton syndrome; Leukocytoclastic vasculitis; Lichen planus; Lichen sclerosus; Ligneous conjunctivitis; Linear IgA disease (LAD); Lupus; Lyme disease chronic; Meniere's disease; Microscopic polyangiitis (MPA); Mixed connective tissue disease (MCTD); Mooren's ulcer; Mucha-Habermann disease; Multifocal Motor Neuropathy (MMN) or MMNCB; Multiple sclerosis; Myasthenia gravis; Myositis; Narcolepsy; Neonatal Lupus; Neuromyelitis optica; Neutropenia; Ocular cicatricial pemphigoid; Optic neuritis; Palindromic rheumatism (PR); PANDAS; Paraneoplastic cerebellar degeneration (PCD); Paroxysmal nocturnal hemoglobinuria (PNH); Parry Romberg syndrome; Pars planitis (peripheral uveitis); Parsonage-Turner syndrome; Pemphigus, Pemphigus vulgaris; Peripheral neuropathy; Perivenous encephalomyelitis; Pernicious anemia (PA); POEMS syndrome; Polyarteritis nodosa; Polyglandular syndromes type I, II, III; Polymyalgia rheumatic; Polymyositis; Postmyocardial infarction syndrome; Postpericardiotomy syndrome; Primary biliary cirrhosis; Primary sclerosing cholangitis; Progesterone dermatitis; Psoriasis; Psoriatic arthritis; Pure red cell aplasia (PRCA); Pyoderma gangrenosum; Raynaud's phenomenon; Reactive Arthritis; Reflex sympathetic dystrophy; Relapsing polychondritis; Restless legs syndrome (RLS); Retroperitoneal fibrosis; Rheumatic fever; Rheumatoid arthritis; Sarcoidosis; Schmidt syndrome; Scleritis; Scleroderma; Sjögren's syndrome; Sperm & testicular autoimmunity; Stiff person syndrome (SPS); Subacute bacterial endocarditis (SBE); Susac's syndrome; Sympathetic ophthalmia (SO); Takayasu's arteritis; Temporal arteritis/Giant cell arteritis; Thrombocytopenic purpura (TTP); Tolosa-Hunt syndrome (THS); Transverse myelitis; Type 1 diabetes; Ulcerative colitis (UC); Undifferentiated connective tissue disease (UCTD); Uveitis; Vasculitis; Vitiligo or Vogt-Koyanagi-Harada Disease.

[0607] In some embodiments, the provided immunomodulatory proteins, including BCMA-Fc fusion proteins and provided multi-domain immunomodulatory (e.g. TIM-BIM) fusion proteins, can be used to treat Scleroderma, Myasthenia gravis, GVHD (including acute GVHD or chronic GVHD), an immune response in connection with transplantation; Antiphospholipid Ab syndrome; Multiple sclerosis; Sjögren's syndrome; IgG4-related disease; Type I diabetes; Rheumatoid arthritis including glucocorticoid therapy (GC) RA or Acute lupus nephritis.

[0608] In some embodiments, the provided immunomodulatory proteins, including BCMA-Fc fusion proteins and provided multi-domain immunomodulatory (e.g. TIM-BIM) fusion proteins, can be used to treat Amyotrophic lateral sclerosis, Neuromyelitis optica, Transverse myelitis, CNS autoimmunity, Guillain-barre syndrome, Neurocystercercosis, Sarcoidosis (T/seroneg), Churg-Strauss Syndrome, Hashimoto's thyroiditis, Grave's disease, immune thrombocytopenia (ITP), Addison's Disease, Polymyositis, or Dermatomyositis.

[0609] In some embodiments, the provided immunomodulatory proteins, including BCMA-Fc fusion proteins and provided multi-domain immunomodulatory (e.g. TIM-BIM) fusion proteins, can be used to treat IgA nephropathy, chronic inflammatory demyelinating polyneuropathy (CIDP), antisynthetase disease such as Jo-1 syndrome, or ANCA vasculitis.

[0610] In some embodiments, the provided immunomodulatory proteins, including BCMA-Fc fusion proteins and provided multi-domain immunomodulatory (e.g. TIM-BIM) fusion proteins, can be used to treat a B cell cancer. In some embodiments, the B cell cancer is a cancer in which BAFF and APRIL are involved or implicated in providing an autocrine survival loop to the B cells. In some embodiments, the cancer is B cell chronic lymphocytic leukemia, non-Hodgkins' lymphoma or myeloma. In some embodiments, the cancer is myeloma.

[0611] In some embodiments, a therapeutic amount of the pharmaceutical composition is administered. Typically, precise amount of the compositions of the present invention to be administered can be determined by a physician with consideration of individual differences in age, weight, extent of infection, and condition of the patient (subject). The optimal dosage and treatment regime for a particular patient can readily be determined by one skilled in the art of medicine by monitoring the patient for signs of disease and adjusting the treatment accordingly.

[0612] The administration of the subject compositions may be carried out in any convenient manner, including by aerosol inhalation, injection, ingestion, transfusion, implantation or transplantation. The compositions described herein may be administered to a patient subcutaneously, intradermally, intratumorally, intranodally, intramedullary, intramuscularly, by intravenous (i.v.) injection, or intraperitoneally. In one embodiment, the therapeutic composition is administered to a patient by intradermal or subcutaneous injection. In another embodiment, the therapeutic composition is administered by i.v. injection.

[0613] In some embodiments, the pharmaceutical composition is administered as a monotherapy (i.e., as a single agent) or as a combination therapy (i.e., in combination with one or more additional immunosuppressant agents). In some embodiments, the additional agent is a glucocorticoid (e.g., prednisone, dexamethasone, and hydrocortisone), cytostatic agent, such as a cytostatic agent that affect proliferation of T cells and/or B cells (e.g., purine analogs, alkylating agents, or antimetabolites), an antibody (e.g., anti-CD20, anti-CD25 or anti-CD3 monoclonal antibodies), cyclosporine, tacrolimus, sirolimus, everolimus, an interferon, an opiod, a TNF binding protein, mycophenolate, small biological agent, such as fingolimod or myriocin, cytokine, such as interferon beta-1a, an integrin agonist, or an integrin antagonist.

### VIII. Articles of Manufacture and Kits

[0614] Also provided herein are articles of manufacture that comprise the pharmaceutical compositions described herein in suitable packaging. Suitable packaging for compositions (such as ophthalmic compositions) described herein are known in the art, and include, for example, vials (such as sealed vials), vessels, ampules, bottles, jars, flexible packaging (e.g., sealed Mylar or plastic bags), and the like. These articles of manufacture may further be sterilized and/or sealed.

[0615] Further provided are kits comprising the pharmaceutical compositions (or articles of manufacture) described herein, which may further comprise instruction(s) on methods of using the composition, such as uses described herein. The kits described herein may also include other materials desirable from a commercial and user standpoint, including other buffers, diluents, filters, needles, syringes, and package inserts with instructions for performing any methods described herein.

### IX. Exemplary Embodiments

[0616] Among the provided embodiments are:

[0617] 1. An immunomodulatory protein comprising:

[0618] (1) at least one T cell inhibitory molecule (TIM) that binds to (i) a T cell stimulatory receptor, or (ii) a ligand of a T cell stimulatory receptor; and/or that antagonizes activity of a T cell stimulatory receptor; and

[0619] (2) at least one B cell inhibitory molecule (BIM) that binds to a ligand of a B cell stimulatory receptor and/or antagonizes activity of a B cell stimulatory receptor.

[0620] 2. The immunomodulatory protein of embodiment 1, wherein the TIM binds to a ligand of a T cell stimulatory receptor.

[0621] 3. The immunomodulatory protein of embodiment 2, wherein:

[0622] the T cell stimulatory receptor is CD28; and/or

[0623] the ligand of the T cell stimulatory receptor is CD80 or CD86.

[0624] 4. The immunomodulatory protein of any of embodiments 1-3, wherein the TIM is a CTLA-4 extracellular domain or a binding portion thereof that binds to CD80 or CD86.

[0625] 5. The immunomodulatory protein of embodiment 4, wherein the CTLA-4 extracellular domain or binding portion thereof consists of (i) the sequence of amino acids set forth in SEQ ID NO:1 or SEQ ID NO:2, (ii) a variant CTLA-4 sequence of amino acids that has at least 85% sequence identity to SEQ ID NO:1 or SEQ ID NO:2; or (iii) a portion thereof comprising an IgV domain.

[0626] 6. The immunomodulatory protein of embodiment 4 or embodiment 5, wherein the CTLA-4 extracellular domain consists of the sequence of amino acids set forth in SEQ ID NO: 1.

[0627] 7. The immunomodulatory protein of embodiment 4 or embodiment 5, wherein the CTLA-4 extracellular domain consists of a variant CTLA-4 sequence of amino acids that has at least 85% sequence identity to SEQ ID NO:1 or a portion thereof comprising an IgV domain, wherein the variant sequence comprises one or more amino acid substitutions in SEQ ID NO:1 or the portion thereof comprising the IgV domain.

[0628] 8. The immunomodulatory protein of embodiment 7, wherein the variant CTLA-4 binds to the ectodomain of CD80 and CD86, optionally wherein binding affinity to one or both of CD80 and CD86 is increased compared to the sequence set forth in SEQ ID NO:1 or the portion thereof comprising the IgV domain.

[0629] 9. The immunomodulatory protein of embodiment 8, wherein the variant CTLA-4 consists of the sequence set forth in SEQ ID NO:92 or a portion thereof comprising the IgV domain.

[0630] 10. The immunomodulatory protein of embodiment 8, wherein the variant CTLA-4 consists of the sequence set forth in SEQ ID NO: 113 or a portion thereof comprising the IgV domain.

[0631] 11. The immunomodulatory protein of embodiment 8, wherein the variant CTLA-4 consists of the sequence set forth in SEQ ID NO: 165 or a portion thereof comprising the IgV domain.

[0632] 12. The immunomodulatory protein of embodiment 8, wherein the variant CTLA-4 consists of the sequence set forth in SEQ ID NO: 186 or a portion thereof comprising the IgV domain.

[0633] 13. The immunomodulatory protein of any of embodiments 1-12, wherein:
[0634] the ligand of a B cell stimulatory receptor is APRIL or BAFF; and/or the B cell stimulatory receptor is TACI, BCMA, or BAFF-receptor.

[0635] 14. The immunomodulatory protein of any of embodiments 1-13, wherein the BIM is a TACI polypeptide that consists of the TACI extracellular domain or a binding portion thereof that binds to APRIL, BAFF, or a BAFF/APRIL heterotrimer.

[0636] 15. The immunomodulatory protein of embodiment 14, wherein the TACI polypeptide is a truncated wild-type TACI extracellular domain or is a variant thereof, wherein the truncated wild-type TACI extracellular domain contains the cysteine rich domain 2 (CRD2) but lacks the entirety of the cysteine rich domain 1 (CRD1), wherein the variant TACI polypeptide comprises one or more amino acid substitutions in the truncated wild-type TACI extracellular domain.

[0637] 16. The immunomodulatory protein of embodiment 14 or embodiment 15, wherein the TACI polypeptide is a truncated wild-type TACI extracellular domain or is a variant thereof, wherein the truncated wild-type TACI extracellular domain consists of a contiguous sequence contained within amino acid residues 67-118 that consists of amino acid residues 71-104, with reference to positions set forth in SEQ ID NO:709, wherein the variant TACI polypeptide comprises one or more amino acid substitutions in the truncated wild-type TACI extracellular domain.

[0638] 17. The immunomodulatory protein of any of embodiments 1-13, wherein the BIM is a BCMA polypeptide that consists of the BCMA extracellular domain or a binding portion thereof that binds to APRIL, BAFF, or a BAFF/APRIL heterotrimer.

[0639] 18. The immunomodulatory protein of any of embodiments 14-16, wherein the truncated wild-type TACI extracellular domain is 35, 36, 37, 38, 39, 40, 41, 42, 43, 44, 45, 46, 47, 48, 59, 50 or 51 amino acids in length.

[0640] 19. The immunomodulatory protein of any of embodiments 14-16 and 17, wherein the truncated wild-type TACI extracellular domain consists of amino acid residues 68-110 set forth in SEQ ID NO: 709.

[0641] 20. The immunomodulatory protein of any of embodiments 14-16 and 17-19, wherein the TACI polypeptide consists of the sequence of amino acid set forth in SEQ ID NO:528 or is a variant thereof containing one or more amino acid substitutions in the sequence set forth in SEQ ID NO:528.

[0642] 21. The immunomodulatory protein of any of embodiments 14-16 and 17-20, wherein the truncated TACI polypeptide or the variant thereof binds to APRIL, BAFF, or a BAFF/APRIL heterotrimer.

[0643] 22. The immunomodulatory protein of any of embodiments 14-16, wherein the TACI polypeptide is a truncated wild-type TACI extracellular domain that consists of the sequence set forth in SEQ ID NO: 516.

[0644] 23. The immunomodulatory protein of any of embodiments 14-16 and 17-21, wherein the TACI polypeptide is a truncated wild-type TACI extracellular domain that consists of the sequence set forth in SEQ ID NO:528.

[0645] 24. The immunomodulatory protein of any of embodiments 15-16 and 17-21, wherein the TACI polypeptide is the variant TACI polypeptide, wherein the variant TACI polypeptide has increased binding affinity to one or both of APRIL and BAFF compared to the truncated TACI polypeptide.

[0646] 25. The immunomodulatory protein of any of embodiments 15-16, 17-21 and 24, wherein the variant TACI polypeptide comprises one or more amino acid substitutions at positions selected from among 74, 75, 76, 77, 78, 79, 82, 83, 84, 85, 86, 87, 88, 92, 95, 97, 98, 99, 101, 102 and 103, corresponding to numbering set forth in SEQ ID NO:709.

[0647] 26. The immunomodulatory protein of embodiment 25, wherein the one or more amino acid substitutions are selected from E74V, Q75E, Q75R, G76S, K77E, F78Y, Y79F, L82H, L82P, L83S, R84G, R84L, R84Q, D85E, D85V, C86Y, I87L, I87M, S88N, I92V, Q95R, P97S, K98T, Q99E, A101D, Y102D, F103S, F103V, F103Y, or a conservative amino acid substitution thereof.

[0648] 27. The immunomodulatory protein of embodiment 25 or embodiment 26, wherein the one or more amino acid substitutions comprise at least one of E74V, K77E, Y79F, L82H, L82P, R84G, R84L, R84Q, D85V, or C86Y.

[0649] 28. The immunomodulatory protein of any of embodiments 25-27, wherein the one or more amino acid substitutions are D85E/K98T, I87L/K98T, L82P/I87L, G76S/P97S, K77E/R84L/F103Y, Y79F/Q99E, L83S/F103S, K77E/R84Q, K77E/A101D, K77E/F78Y/Y102D, Q75E/R84Q, Q75R/R84G/I92V, K77E/A101D/Y102D, R84Q/S88N/A101D, R84Q/F103V, K77E/Q95R/A101D or I87M/A101D.

[0650] 29. The immunomodulatory protein of any of embodiments 25-28, wherein the one or more amino acid substitutiosn are K77E/F78Y/Y102D.

[0651] 30. The immunomodulatory protein of any of embodiments 25-28, wherein the one or more amino acid substitutions are Q75E/R84Q.

[0652] 31. The immunomodulatory protein of any of embodiments 25-29, wherein the variant TACI polypeptide is set forth in SEQ ID NO: 541.

[0653] 32. The immunomodulatory protein of any of embodiments 25-28 and 30, wherein the variant TACI polypeptide is set forth in SEQ ID NO:542.

[0654] 33. The immunomodulatory protein of embodiment 14, wherein the TACI polypeptide is a variant TACI polypeptide that comprises one or more amino acid substitutions in the extracellular domain (ECD) of a reference TACI polypeptide or a specific binding fragment thereof at positions selected from among 40, 59, 60, 61, 74, 75, 76, 77, 78, 79, 82, 83, 84, 85, 86, 87, 88, 92, 95, 97, 98, 99, 101, 102 and 103, corresponding to numbering of positions set forth in SEQ ID NO:709.

[0655] 34. The immunomodulatory protein of embodiment 33, wherein the reference TACI polypeptide is a truncated polypeptide consisting of the extracellular domain of TACI or a specific binding portion thereof that binds to APRIL, BAFF, or a BAFF/APRIL heterotrimer.

[0656] 35. The immunomodulatory protein of any of embodiments 33 and 34, wherein the reference TACI polypeptide comprises (i) the sequence of amino acids set forth in SEQ ID NO:709, (ii) a sequence of amino acids that has at least 95% sequence identity to SEQ ID NO:709; or (iii) a portion of (i) or (ii) comprising one or both of a CRD1 domain and CRD2 domain that binds to APRIL, BAFF, or a BAFF/APRIL heterotrimer.

[0657] 36. The immunomodulatory protein of any of embodiments 33-35, wherein the reference TACI polypeptide lacks an N-terminal methionine.

[0658] 37. The immunomodulatory protein of any of embodiments 33-36, wherein the reference TACI polypeptide comprises the CRD1 domain and the CRD2 domain.

[0659] 38. The immunomodulatory protein of any of embodiments 33-37, wherein the reference TACI polypeptide comprises the sequence set forth in SEQ ID NO:516.

[0660] 39. The immunomodulatory protein of any of embodiments 33-37, wherein the reference TACI polypeptide consists of the sequence set forth in SEQ ID NO:516.

[0661] 40. The immunomodulatory protein of any of embodiments 33-36, wherein the reference TACI polypeptide consists essentially of the CRD2 domain.

[0662] 41. The immunomodulatory protein of any of embodiments 33-36 and 40, wherein the reference TACI polypeptide comprises the sequence set forth in SEQ ID NO:528.

[0663] 42. The immunomodulatory protein of any of embodiments 33-36 and 40, wherein the reference TACI polypeptide consists of the sequence set forth in SEQ ID NO:528.

[0664] 43. The immunomodulatory protein of any of embodiments 33-42, wherein the one or more amino acid substitutions are selected from W40R, Q59R, R60G, T61P E74V, Q75E, Q75R, G76S, K77E, F78Y, Y79F, L82H, L82P, L83S, R84G, R84L, R84Q, D85E, D85V, C86Y, I87L, I87M, S88N, I92V, Q95R, P97S, K98T, Q99E, A101D, Y102D, F103S, F103V, F103Y, or a conservative amino acid substitution thereof.

[0665] 44. The immunomodulatory protein of any of embodiments 33-43, wherein the one or more amino acid substitutions comprise at least one of E74V, K77E, Y79F, L82H, L82P, R84G, R84L, R84Q, D85V or C86Y.

[0666] 45. The immunomodulatory protein of any of embodiments 33-44, wherein the one or more amino acid substitution comprise at least the amino acid substitution K77E.

[0667] 46. The immunomodulatory protein of any of embodiments 33-44, wherein the one or more amino acid substitution comprise at least the amino acid substitution R84G.

[0668] 47. The immunomodulatory protein of any of embodiments 33-44, wherein the one or more amino acid substitution comprise at least the amino acid substitution R84Q.

[0669] 48. The immunomodulatory protein of any of embodiments 33-47, wherein the one or more amino acid substitutions are D85E/K98T, I87L/K98T, R60G/Q75E/L82P, R60G/C86Y, W40R/L82P/F103Y, W40R/Q59R/T61P/K98T, L82P/I87L, G76S/P97S, K77E/R84L/F103Y, Y79F/Q99E, L83S/F103S, K77E/R84Q, K77E/A101D, K77E/F78Y/Y102D, Q75E/R84Q, Q75R/R84G/I92V, K77E/A101D/Y102D, R84Q/S88N/A101D, R84Q/F103V, K77E/Q95R/A101D or I87M/A101D.

[0670] 49. The immunomodulatory protein of any of embodiments 33-44, 45 and 48, wherein the one or more amino acid substitutions are K77E/F78Y/Y102D.

[0671] 50 The immunomodulatory protein of any of embodiments 33-44, 47 and 48, wherein the one or more amino acid substitutions are Q75E/R84Q.

[0672] 51. The immunomodulatory protein of any of embodiments 33-50, wherein the variant TACI polypeptide has increased binding affinity to one or both of APRIL and BAFF compared to the reference TACI polypeptide.

[0673] 52. The immunomodulatory protein of embodiment 24 or embodiment 51, wherein the variant TACI polypeptide has increased binding affinity to APRIL.

[0674] 53. The immunomodulatory protein of embodiment 24 or embodiment 51, wherein the variant TACI polypeptide has increased binding affinity to BAFF.

[0675] 54. The immunomodulatory protein of embodiment 24 or embodiment 51, wherein the variant TACI polypeptide has increased binding affinity to APRIL and BAFF.

[0676] 55. The immunomodulatory protein of any of embodiments 24, and 51-54, wherein the increased binding affinity for BAFF or APRIL is independently increased more than 1.2-fold, 1.5-fold, 2-fold, 3-fold, 4-fold, 5-fold, 6-fold, 7-fold, 8-fold, 9-fold, 10-fold, 20-fold, 30-fold, 40-fold, 50-fold or 60-fold.

[0677] 56. The immunomodulatory protein of any of embodiments 15-16, 17-21 and 24-55, wherein:

[0678] the variant TACI polypeptide comprises the sequence set forth in any one of SEQ ID NOS: 517-527, 536, 537, 682-701; or

[0679] the variant TACI polypeptide comprises the sequence set forth in any one of SEQ ID NOS: 529-535, 538-550, 673-681.

[0680] 57. The immunomodulatory protein of any of embodiments 15-16, 17-21 and 24-55, wherein:

[0681] the variant TACI polypeptide consists or consists essentially of the sequence set forth in any one of SEQ ID NOS: 517-527, 536, 537, 682-701; or

[0682] the variant TACI polypeptide consists or consists essentially of the sequence set forth in any one of SEQ ID NOS: 529-535, 538-550, 673-681.

[0683] 58. The immunomodulatory protein of any of embodiments 15-16, 17-21, 24-55 and 57, wherein the variant TACI polypeptide consists or consists essentially of the sequence set forth in SEQ ID NO: 541.

[0684] 59. The immunomodulatory protein of any of embodiments 15-16, 17-21, 24-55 and 57, wherein the variant TACI polypeptide consists or consists essentially of the sequence set forth in SEQ ID NO:542.

[0685] 60. The immunomodulatory protein of any of embodiments 15-16, 17-21, 24-55 and 57, wherein the variant TACI polypeptide consists or consists essentially of the sequence set forth in SEQ ID NO:688.

[0686] 61. The immunomodulatory protein of any of embodiments 15-16, 17-21, 24-55 and 57, wherein the variant TACI polypeptide consists or consists essentially of the sequence set forth in SEQ ID NO:535.

[0687] 62. The immunomodulatory protein of any of embodiments 15-16, 17-21 and 24-61, comprising a heterologous moiety that is linked to the at least one TACI polypeptide.

[0688] 63. The immunomodulatory protein of embodiment 62, wherein the heterologous moiety is a half-life extending moiety, a multimerization domain, a targeting moiety that binds to a molecule on the surface of a cell, or a detectable label.

[0689] 64. The immunomodulatory protein of embodiment 63, wherein the half-life extending moiety comprises a multimerization domain, albumin, an albumin-binding polypeptide, Pro/Ala/Ser (PAS), a C-terminal peptide (CTP) of the beta subunit of human chorionic gonadotropin, polyethylene glycol (PEG), long unstructured hydrophilic sequences of amino acids (XTEN), hydroxyethyl starch (HES), an albumin-binding small molecule, or a combination thereof.

[0690] 65. The immunomodulatory protein of embodiment 17, wherein the BCMA polypeptide consists of the sequence set forth in SEQ ID NO:356.

[0691] 66. The immunomodulatory protein of embodiment 17, wherein the BCMA polypeptide is a variant BCMA polypeptide comprising one or more amino acid substitutions in the extracellular domain (ECD) of a reference BCMA polypeptide or a specific binding fragment at positions selected from among 9, 10, 11, 14, 16, 19, 20, 22, 25, 27, 29, 30, 31, 32, 35, 36, 39, 43, 45, 46, 47 and 48, corresponding to numbering set forth in SEQ ID NO:710.

[0692] 67. An immunomodulatory protein comprising a variant BCMA polypeptide, wherein the variant BCMA polypeptide comprises one or more amino acid substitutions in the extracellular domain (ECD) of a reference BCMA polypeptide or a specific binding fragment thereof at positions selected from among 9, 10, 11, 14, 16, 19, 20, 22, 25, 27, 29, 30, 31, 32, 35, 36, 39, 43, 45, 46, 47 and 48, corresponding to numbering of positions set forth in SEQ ID NO:710.

[0693] 68. The immunomodulatory protein of embodiment 66 or embodiment 67, wherein the reference BCMA polypeptide is a polypeptide consisting of the extracellular domain of BCMA or a specific binding portion thereof that binds to APRIL, BAFF, or a BAFF/APRIL heterotrimer.

[0694] 69. The immunomodulatory protein of any of embodiments 66-68, wherein the reference BCMA polypeptide comprises (i) the sequence of amino acids set forth in SEQ ID NO:710, (ii) a sequence of amino acids that has at least 95% 37a.equence identity to SEQ ID NO:710; or (iii) a portion of (i) or (ii) comprising the CRD.

[0695] 70. The immunomodulatory protein of any of embodiments 66-69, wherein the reference BCMA lacks an N-terminal methionine.

[0696] 71. The immunomodulatory protein of any of embodiments 66-70, wherein the reference BCMA polypeptide comprises (i) the sequence of amino acids set forth in SEQ ID NO:356, (ii) a sequence of amino acids that has at least 95% sequence identity to SEQ ID NO:356; or (iii) a portion of (i) or (ii) comprising the CRD.

[0697] 72. The immunomodulatory protein of any of embodiments 66-71, wherein the reference BCMA polypeptide comprises the sequence set forth in SEQ ID NO:356.

[0698] 73. The immunomodulatory protein of any of embodiments 66-71, wherein the reference BCMA polypeptide consists of the sequence set forth in SEQ ID NO:356.

[0699] 74. The immunomodulatory protein of any of embodiments 66-73, wherein the one or more amino acid substitutions are selected from S9G, S9N, S9Y, Q10E, Q10P, N11D, N11S, F14Y, S16A, H19A, H19C, H19D, H19E, H19F, H19G, H19I, H19K, H19L, H19M, H19N, H19P, H19Q, H19R, H19S, H19T, H19V, H19W, H19Y, A20T, I22L, I22V, Q25E, Q25F, Q25G, Q25H, Q25I, Q25K, Q25L, Q25M, Q25S, Q25V, Q25Y, R27H, R27L, S29P, S30G, S30Y, N31D, N31G, N31H, N31K, N31L, N31M, N31P, N31S, N31V, N31Y, T32I, T32S, L35A, L35M, L35P, L35S, L35V, L35Y, T36A, T36G, T36N, T36M, T36S, T36V, R39L, R39Q, A43E, A43S, V45A, V45D, V45I, T46A, T46I, N47D, N47Y, S48G, or a conservative amino acid substitution thereof.

[0700] 75. The immunomodulatory protein of any of embodiments 66-74, wherein the one or more amino acid substitutions comprise at least one substitution at position 19, optionally wherein the at least one substitution is selected from H19A, H19C, H19D, H19E, H19F, H19G, H19I, H19K, H19L, H19M, H19N, H19P, H19Q, H19R, H19S, H19T, H19V, H19W, H19Y.

[0701] 76. The immunomodulatory protein of any of embodiments 66-75, wherein the one or more amino acid substitution comprise at least the amino acid substitution H19L.

[0702] 77. The immunomodulatory protein of any of embodiments 66-75, wherein the one or more amino acid substitution comprise at least the amino acid substitution H19K.

[0703] 78. The immunomodulatory protein of any of embodiments 66-75, wherein the one or more amino acid substitution comprise at least the amino acid substitution H19R.

[0704] 79. The immunomodulatory protein of any of embodiments 66-75, wherein the one or more amino acid substitution comprise at least the amino acid substitution H19Y.

[0705] 80. The immunomodulatory protein of any of embodiments 66-79, wherein the one or more amino acid substitutions comprise at least one substitution at position 25, optionally wherein the at least one substitution is selected from Q25E, Q25F, Q25G, Q25H, Q25I, Q25K, Q25L, Q25M, Q25S, Q25V, Q25Y.

[0706] 81. The immunomodulatory protein of any of embodiments 66-80, wherein the one or more amino acid substitutions comprise at least one substitution at position 31, optionally wherein the at least one substitution is selected from N31D, N31G, N31H, N31K, N31L, N31M, N31P, N31S, N31V, N31Y.

[0707] 82. The immunomodulatory protein of any of embodiments 66-81, wherein the one or more amino acid substitutions comprise at least one substitution at position 35, optionally wherein the at least one substitution is selected from L35A, L35M, L35P, L35S, L35V, L35Y.

[0708] 83. The immunomodulatory protein of any of embodiments 66-82, wherein the one or more amino acid substitutions comprise at least one substitution at position 36, optionally wherein the at least one substitution is selected from T36A, T36G, T36N, T36M, T36S, T36V.

[0709] 84. The immunomodulatory protein of any of embodiments 66-83, wherein the one or more amino acid substitutions are H19Y/S30G; H19Y/V45A; F14Y/H19Y; H19Y/V45D; H19Y/A43E; H19Y/T36A; H19Y/I22V; N11D/H19Y; H19Y/T36M; N11S/H19Y; H19Y/L35P/T46A; H19Y/N47D; S9D/H19Y; H19Y/S30G/V45D; H19Y/R39Q; H19Y/L35P; S9D/H19Y/R27H; Q10P/H19Y/Q25H; H19Y/R39L/N47D; N11D/H19Y/N47D; H19Y/T32S; N11S/H19Y/S29P; H19Y/R39Q/N47D; S16A/H19Y/R39Q; S9N/H19Y/N31K/T46I; H19Y/R27L/N31Y/T32S/T36A; N11S/H19Y/T46A; H19Y/T32I; S9G/H19Y/T36S/A43S; H19Y/S48G; S9N/H19Y/I22V/N31D; S9N/H19Y/Q25K/N31D; S9G/H19Y/T32S; H19Y/T36A/N47Y; H19Y/V45A/T46I; H19Y/Q25K/N31D; H19Y/Q25H/R39Q/V45D; H19Y/T32S/N47D; Q10E/H19Y/A20T/T36S; H19Y/T32S/V45I; H19F/Q25E/N31L/L35Y/T36S; H19F/Q25F/N31S/T36S; H19I/Q25F/N31S/T36V; H19F/Q25V/N31M/T36S; H19Y/Q25Y/N31L/L35Y/T36S; H19F/Q25I/N31M/L35A/T36S; H19I/Q25L/N31L/L35Y/T36S; H19F/Q25L/N31G/L35P/T36A; H19Y/I22L/N31G; H19F/I22V/Q25M/N31P/T36M; H19Y/N31L/L35Y/T36S; H19L/S30G/N31H/L35A; H19L/Q25S/N31V/L35S/T36V; H19L/Q25S/S30Y/N31G/L35M/T36V; H19F/Q25F/N31L/L35Y/T36S; H19F/Q25F/N31S/T36G; H19F/I22V/Q25S/N31V/L35S/T36V; H19F/Q25G/N31S/L35V/T36N; H19L/Q25H/N31D/L35S; or H19F/Q25F/N31S/L35Y/T36S.

[0710] 85. The immunomodulatory protein of any of embodiments 66-75, 79, and 84, wherein the one or more amino acid substitutions comprise S16A/H19Y/R39Q.

[0711] 86. The immunomodulatory protein of any of embodiments 66-85, wherein the variant BCMA polypeptide has increased binding affinity to one or both of APRIL and BAFF compared to the reference TACI polypeptide.

[0712] 87. The immunomodulatory protein of embodiment 86, wherein the variant BCMA polypeptide has increased binding affinity to APRIL.

[0713] 88. The immunomodulatory protein of embodiment 86, wherein the variant BCMA polypeptide has increased binding affinity to BAFF.

[0714] 89. The immunomodulatory protein of embodiment 86, wherein the variant BCMA polypeptide has increased binding affinity to APRIL and BAFF.

[0715] 90. The immunomodulatory protein of any of embodiments 86-89, wherein the increased binding affinity for BAFF or APRIL is independently increased more than 1.2-fold, 1.5-fold, 2-fold, 3-fold, 4-fold, 5-fold, 6-fold, 7-fold, 8-fold, 9-fold, 10-fold, 20-fold, 30-fold, 40-fold, 50-fold or 60-fold.

[0716] 91. The immunomodulatory protein of any of embodiments 66-90, wherein the variant BCMA polypeptide comprises the sequence set forth in any one of SEQ ID NOS: 357-435.

[0717] 92. The immunomodulatory protein of any of embodiments 66-90, wherein the variant BCMA polypeptide consists or consists essentially of the sequence set forth in any one of SEQ ID NOS: 357-435.

[0718] 93. The immunomodulatory protein of any of embodiments 66-90, wherein the variant BCMA polypeptide consists or consists essentially of the sequence set forth in SEQ ID NO: 381.

[0719] 94. The immunomodulatory protein of any of embodiments 66-90, wherein the variant BCMA polypeptide consists or consists essentially of the sequence set forth in SEQ ID NO:411.

[0720] 95. The immunomodulatory protein of any of embodiments 66-90, wherein the variant BCMA polypeptide consists or consists essentially of the sequence set forth in SEQ ID NO:405.

[0721] 96. The immunomodulatory protein of any of embodiments 66-90, wherein the variant BCMA polypeptide consists or consists essentially of the sequence set forth in SEQ ID NO:406.

[0722] 97. The immunomodulatory protein of any of embodiments 17 and 66-96, comprising a heterologous moiety that is linked to the at least one BCMA polypeptide.

[0723] 98. The immunomodulatory protein of embodiment 97, wherein the heterologous moiety is a half-life extending moiety, a multimerization domain, a targeting moiety that binds to a molecule on the surface of a cell, or a detectable label.

[0724] 99. The immunomodulatory protein of embodiment 98, wherein the half-life extending moiety comprises a multimerization domain, albumin, an albumin-binding polypeptide, Pro/Ala/Ser (PAS), a C-terminal peptide (CTP) of the beta subunit of human chorionic gonadotropin, polyethylene glycol (PEG), long unstructured hydrophilic sequences of amino acids (XTEN), hydroxyethyl starch (HES), an albumin-binding small molecule, or a combination thereof.

[0725] 100. The immunomodulatory protein of any of embodiments 17 and 66-99, comprising an Fc region of an immunoglobulin that is linked to the at least one BCMA polypeptide.

[0726] 101. The immunomodulatory protein of any of embodiments 1-17, 18-20, 21-23, 24-33, 39-66 and 68-100, wherein the at least one TIM comprises only one TIM.

[0727] 102. The immunomodulatory protein of any of embodiments 1-17, 18-20, 21-23, 24-33, 39-66 and 68-100, wherein the at least one TIM comprises 2, 3, 4, or 5 TIMs, optionally wherein each TIM is the same.

[0728] 103. The immunomodulatory protein of embodiment 102, wherein each TIM is linked directly or indirectly via a linker, optionally wherein the linker is a peptide linker.

[0729] 104. The immunomodulatory protein of any of embodiments 1-17, 18-20, 21-23, 24-33, 39-66 and 68-103, wherein the at least one BIM comprises only one BIM.

[0730] 105. The immunomodulatory protein of any of embodiments 1-17, 18-20, 21-23, 24-33, 39-66 and 68-103, wherein the at least one BIM comprises 2, 3, 4, or 5 BIMs, optionally wherein each BIM is the same.

[0731] 106. The immunomodulatory protein of embodiment 105, wherein each BIM is linked directly or indirectly via a linker, optionally wherein the linker is a peptide linker

[0732] 107. The immunomodulatory protein of embodiment 103 or embodiment 106, wherein the linker is a peptide linker and the peptide linker is selected from GSGGS (SEQ ID NO: 592), GGGGS (G4S; SEQ ID NO: 593), GSGGGGS (SEQ ID NO: 590), GGGGSGGGGS (2×GGGGS; SEQ ID NO: 594), GGGGSGGGGSGGGGS (3×GGGGS; SEQ ID NO: 595), GGGGSGGGGSGGGGSGGGGS (4×GGGGS, SEQ ID NO:600), GGGGSGGGGSGGGGSGGGGSGGGGS (5×GGGGS, SEQ ID NO: 671), GGGGSSA (SEQ ID NO: 596) or combinations thereof.

[0733] 108. The immunomodulatory protein of any of embodiments 1-17, 18-20, 21-23, 24-33, 39-66 and 68-107 wherein the at least one TIM and the at least one BIM are linked directly or indirectly via a linker, optionally wherein the linker comprises a peptide linker and/or a multimerization moiety.

[0734] 109. The immunomodulatory protein of embodiment 108, wherein the linker comprises a peptide linker and the peptide linker is selected from GSGGS (SEQ ID NO: 592), GGGGS (G4S; SEQ ID NO: 593), GSGGGGS (SEQ ID NO: 590), GGGGSGGGGS (2×GGGGS; SEQ ID NO: 594), GGGGSGGGGSGGGGS (3×GGGGS; SEQ ID NO: 595), GGGGSGGGGSGGGGSGGGGS (4×GGGGS, SEQ ID NO:600), GGGGSGGGGSGGGGSGGGGSGGGGS (5×GGGGS, SEQ ID NO: 671), GGGGSSA (SEQ ID NO: 596) or combinations thereof.

[0735] 110. The immunomodulatory protein of embodiment 108, wherein the linker comprises a peptide linker and the peptide linker is selected from SEQ ID NO: 711 (1×EAAAK), SEQ ID NO: 712 (2×EAAAK), SEQ ID NO: 713 (3×EAAAK), SEQ ID NO: 714 (4×EAAAK), SEQ ID NO: 715 (5×EAAAK), SEQ ID NO: 665 (6×EAAAK).

[0736] 111. The immunomodulatory protein of any of embodiments 1-17, 18-20, 21-23, 24-33, 34-66 and 68-110, wherein the immunomodulatory protein is a monomer and/or comprises a single polypeptide chain.

[0737] 112. The immunomodulatory protein of embodiment 111, wherein the at least one TIM is amino-terminal to the at least one BIM in the polypeptide.

[0738] 113. The immunomodulatory protein of embodiment 111, wherein the at least one TIM is carboxy-terminal to the at least one BIM in the polypeptide.

[0739] 114. The immunomodulatory protein of any of embodiments 1-17, 18-20, 21-23, 24-33, 39-66 and 68-113, wherein the immunomodulatory protein further comprises a detectable label, optionally wherein the detectable label is a Flag tag, a His tag, or a myc tag.

[0740] 115. The immunomodulatory protein of any of embodiments 1-17, 18-20, 21-23, 24-33, 39-64, and 101-114, wherein the immunomodulatory protein comprises the sequence of amino acids set forth in any of SEQ ID NOS: 618-623, or a sequence that exhibits at least 85% 86%, 87%, 88%, 89%, 90%, 91%, 92%, 93%, 94%, 95%, 96%, 97%, 98%, 99% or more sequence identity thereto and retains activity.

[0741] 116. The immunomodulatory protein of any of embodiments 18-20, 21-23, 24-33, 39-64, and 101-113, wherein the immunomodulatory protein comprises the sequence of amino acids set forth in any of SEQ ID NOS: 703-708, or a sequence that exhibits at least 85% 86%, 87%, 88%, 89%, 90%, 91%, 92%, 93%, 94%, 95%, 96%, 97%, 98%, 99% or more sequence identity thereto and retains activity.

[0742] 117. The immunomodulatory protein of embodiment 108, wherein the linker comprises a multimerization domain wherein the multimerization domain promotes dimerization, trimerization, tetramerization, or pentamerization.

[0743] 118. The immunomodulatory protein of embodiment 108 or embodiment 117, wherein the multimerization domain is an immunoglobulin Fc region.

[0744] 119. The immunomodulatory protein of any of embodiments 1-16, 18-20, 21-23, 24-33, 39-66 and 68-110117 and 118, wherein the immunomodulatory protein is a dimer.

[0745] 120. The immunomodulatory protein of embodiment 100 and 118, wherein the immunoglobulin Fc region is a homodimeric Fc region.

[0746] 121. The immunomodulatory protein of embodiment 100 and 118, wherein the immunoglobulin Fc region is a heterodimeric Fc region

[0747] 122. The immunomodulatory protein of embodiment 1-16, 18-20, 21-23, 24-33, 39-66 and 68-110, and 117-120, wherein the immunomodulatory protein is a homodimer, wherein each polypeptide of the dimer is the same.

[0748] 123. The immunomodulatory protein of embodiment 122, wherein each polypeptide comprises the at least one TIM and the at least one BIM and wherein the at least one TIM is amino-terminal to the at least one BIM in each polypeptide.

[0749] 124. The immunomodulatory protein of embodiment 122, wherein each polypeptide comprises the at least one TIM and the at least one BIM and wherein the at least one TIM is carboxy-terminal to the at least one BIM in each polypeptide.

[0750] 125. The immunomodulatory protein of any of embodiments 100, embodiments 118-120 and 122-124, wherein the immunoglobulin Fc is an IgG1 Fc domain, or is a variant Fc that exhibits reduced binding affinity to an Fc receptor and/or reduced effector function, optionally as compared to a wild-type IgG1 Fc domain.

[0751] 126. The immunomodulatory protein of any of embodiments 100, embodiments 118-120 and 122-125, wherein the immunoglobulin Fc is an IgG1 Fc domain and the Fc comprises the amino acid sequence set forth in SEQ ID NO: 597.

[0752] 127. The immunomodulatory protein of any of embodiments 100, embodiments 118-120 and 122-125, wherein the immunoglobulin Fc is a variant IgG1 Fc domain comprising one or more amino acid substitutions selected from L234A, L234V, L235A, L235E, G237A, S267K, R292C, N297G, and V302C, by EU numbering.

[0753] 128. The immunomodulatory protein of embodiment 127, wherein the immunoglobulin Fc region contains the amino acid substitutions L234A, L235E an G237A by EU numbering or the amino acid substitutions R292C, N297G and V302C by EU numbering.

[0754] 129. The immunomodulatory protein of any of embodiments 100, embodiments 118-120 and 122-125, embodiment 127 and embodiment 128, wherein the Fc is a variant Fc comprising the amino acid sequence set forth in SEQ ID NO:589.

[0755] 130. The immunomodulatory protein of any of embodiments 1-16, 18-20, 21-23, 24-33, 39-65 and 68-110, and 117-128, wherein the immunomodulatory protein comprises the sequence of amino acids set forth in any of SEQ ID NOS: 610-617, 624-627, 637, 638, 643, 644, 648, 653 and 654, or a sequence that exhibits at least 85% 86%, 87%, 88%, 89%, 90%, 91%, 92%, 93%, 94%, 95%, 96%, 97%, 98%, 99% or more sequence identity thereto and retains activity.

[0756] 131. The immunomodulatory protein of any of embodiments 1-13, 17, 65, 66, 68-110, and 117-128, wherein the immunomodulatory protein comprises the sequence of amino acids set forth in any of SEQ ID NOS: 601-609, 631-636, 645-647, 649-652, 655-659, or a sequence that exhibits at least 85% 86%, 87%, 88%, 89%, 90%, 91%, 92%, 93%, 94%, 95%, 96%, 97%, 98%, 99% or more sequence identity thereto and retains activity.

[0757] 132. The immunomodulatory protein of embodiment 1-16, 18-20, 21-23, 24-33, 39-66, 68-110, 117-119 and 121 wherein the immunomodulatory protein is a heterodimer, wherein each polypeptide of the dimer is linked to an immunoglobulin Fc domain individually comprising one or more amino acid modifications in a wild-type Fc domain to effect heterodimer formation between the polypeptides.

[0758] 133. The immunomodulatory protein of embodiment 132, wherein the wild-type immunoglobulin Fc is an IgG1 Fc domain.

[0759] 134. The immunomodulatory protein of embodiment 132 or embodiment 133, wherein the one more amino acid modifications are selected from a knob-into-hole modification and a charge mutation to reduce or prevent self-association due to charge repulsion.

[0760] 135. The immunomodulatory protein of any of embodiments 132-134, further comprising one or more amino acid substitutions to reduced binding affinity to an Fc receptor and/or reduced effector function, optionally as compared to a wild-type IgG1 Fc domain.

[0761] 136. The immunomodulatory protein of embodiment 135, wherein the one or more amino acid substitutions are selected from L234A, L234V, L235A, L235E, G237A, S267K, R292C, N297G, and V302C, by EU numbering.

[0762] 137. The immunomodulatory protein of embodiment 135 or embodiment 136, wherein the immunoglobulin Fc region contains the amino acid substitutions L234A, L235E an G237A by EU numbering or the amino acid substitutions R292C, N297G and V302C by EU numbering.

[0763] 138. The immunomodulatory protein of any of embodiments 132-137, wherein the heterodimer comprises a first polypeptide comprising the sequence of amino acids set forth in SEQ ID NO: 662 or 663 and a second polypeptide comprising the sequence of amino acids set forth in SEQ ID NO:660.

[0764] 139. The immunomodulatory protein of any of embodiments 1-138, wherein:

[0765] the immunomodulatory protein blocks binding of APRIL, BAFF, or an APRIL/BAFF heterotrimer to BCMA or TACI; and/or

[0766] the immunomodulatory protein reduces the levels of circulating APRIL, BAFF, or an APRIL/BAFF in the blood following administration to a subject.

[0767] 140. The immunomodulatory protein of any of embodiments 1-138, wherein the immunomodulatory protein reduces or inhibits B cell maturation, differentiation and/or proliferation.

[0768] 141. The immunomodulatory protein of any of embodiments 1-17, 18-20, 21-34, 34-6668-134, wherein:

[0769] the immunomodulatory protein blocks binding of CD80 or CD86 to a costimulatory receptor, optionally wherein the costimulatory receptor is CD28; and/or

[0770] the immunomodulatory protein reduces or inhibits T cell costimulation.

[0771] 142. A nucleic acid molecule(s) encoding the immunomodulatory protein of any of embodiments 1-141.

[0772] 143. The nucleic acid molecule of embodiment 142 that is a synthetic nucleic acid.

[0773] 144. The nucleic acid molecule of embodiment 142 or embodiment 143 that is a cDNA.

[0774] 145. A vector, comprising the nucleic acid molecule of any of embodiments 142-144.

[0775] 146. The vector of embodiment 145 that is an expression vector.

[0776] 147. The vector of embodiment 145 or embodiment 146, wherein the vector is a mammalian expression vector or a viral vector.

[0777] 148. A cell, comprising the nucleic acid of any of embodiments 142-144 or the vector of any of any of embodiments 145-147.

[0778] 149. The cell of embodiment 148 that is a mammalian cell.

[0779] 150. The cell of embodiment 148 or embodiment 149 that is a human cell.

[0780] 151. A method of producing an immunomodulatory protein, comprising introducing the nucleic acid molecule of any of embodiments 142-144 or vector of any of embodiments 145-147 into a host cell under conditions to express the protein in the cell.

[0781] 152. The method of embodiment 151, further comprising isolating or purifying the immunomodulatory protein from the cell.

[0782] 153. An immunomodulatory protein produced by the method of embodiment 151 or embodiment 152.

[0783] 154. A pharmaceutical composition, comprising the immunomodulatory protein of any of embodiments 1-141 and 153.

[0784] 155. A variant BCMA-Fc fusion protein comprising a variant BCMA polypeptide, an Fc region, and a linker between the BCMA polypeptide and Fc region, wherein the variant BCMA polypeptide comprises one or more amino acid substitutions in the extracellular domain (ECD) of an unmodified BCMA polypeptide or a specific binding fragment thereof corresponding to positions selected from among 9, 10, 11, 14, 16, 19, 20, 22, 25, 27, 29, 30, 31, 32, 35, 36, 39, 43, 45, 46, 47 and 48 with reference to positions set forth in SEQ ID NO:710.

[0785] 156. The variant BCMA-Fc fusion protein of embodiment 155, wherein the reference BCMA polypeptide is a polypeptide consisting of the extracellular domain of BCMA or a specific binding portion thereof that binds to APRIL, BAFF, or a BAFF/APRIL heterotrimer.

[0786] 157. The variant BCMA-Fc fusion protein of embodiment 155 or embodiment 156, wherein the reference BCMA polypeptide comprises (i) the sequence of amino acids set forth in SEQ ID NO:710, (ii) a sequence of amino acids that has at least 95% 37a.equence identity to SEQ ID NO: 710; or (iii) a portion of (i) or (ii) comprising the CRD.

[0787] 158. The variant BCMA-Fc fusion protein of any of embodiments 155-157, wherein the reference BCMA lacks an N-terminal methionine.

[0788] 159. The variant BCMA-Fc fusion protein of any of embodiments 155-158, wherein the reference BCMA polypeptide comprises (i) the sequence of amino acids set forth in SEQ ID NO:356, (ii) a sequence of amino acids that has at least 95% sequence identity to SEQ ID NO:356; or (iii) a portion of (i) or (ii) comprising the CRD.

[0789] 160. The variant BCMA-Fc fusion protein of any of embodiments 155-159, wherein the reference BCMA polypeptide comprises the sequence set forth in SEQ ID NO:356.

[0790] 161. The variant BCMA-Fc fusion protein of any of embodiments 155-159, wherein the reference BCMA polypeptide consists of the sequence set forth in SEQ ID NO:356.

[0791] 162. The variant BCMA-Fc fusion protein of any of embodiments 155-161, wherein the one or more amino acid substitutions are selected from S9G, S9N, S9Y, Q10E, Q10P, N11D, N11S, F14Y, S16A, H19A, H19C, H19D, H19E, H19F, H19G, H19I, H19K, H19L, H19M, H19N, H19P, H19Q, H19R, H19S, H19T, H19V, H19W, H19Y, A20T, I22L, I22V, Q25E, Q25F, Q25G, Q25H, Q25I, Q25K, Q25L, Q25M, Q25S, Q25V, Q25Y, R27H, R27L, S29P, S30G, S30Y, N31D, N31G, N31H, N31K, N31L, N31M, N31P, N31S, N31V, N31Y, T32I, T32S, L35A, L35M, L35P, L35S, L35V, L35Y, T36A, T36G, T36N, T36M, T36S, T36V, R39L, R39Q, A43E, A43S, V45A, V45D, V45I, T46A, T46I, N47D, N47Y, S48G, or a conservative amino acid substitution thereof.

[0792] 163. The variant BCMA-Fc fusion protein of any of embodiments 155-162, wherein the one or more amino acid substitutions comprise at least one substitution at position 19, optionally wherein the at least one substitution is selected from H19A, H19C, H19D, H19E, H19F, H19G, H19I, H19K, H19L, H19M, H19N, H19P, H19Q, H19R, H19S, H19T, H19V, H19W, H19Y.

[0793] 164. The variant BCMA-Fc fusion protein of any of embodiments 155-163, wherein the one or more amino acid substitution comprise at least the amino acid substitution H19L.

[0794] 165. The variant BCMA-Fc fusion protein of any of embodiments 155-163, wherein the one or more amino acid substitution comprise at least the amino acid substitution H19K.

[0795] 166. The variant BCMA-Fc fusion protein of any of embodiments 155-163, wherein the one or more amino acid substitution comprise at least the amino acid substitution H19R.

[0796] 167. The variant BCMA-Fc fusion protein of any of embodiments 155-163, wherein the one or more amino acid substitution comprise at least the amino acid substitution H19Y.

[0797] 168. The variant BCMA-Fc fusion protein of any of embodiments 155-167, wherein the one or more amino acid substitutions comprise at least one substitution at position 25, optionally wherein the at least one substitution is selected from Q25E, Q25F, Q25G, Q25H, Q25I, Q25K, Q25L, Q25M, Q25S, Q25V, Q25Y.

[0798] 169. The variant BCMA-Fc fusion protein of any of embodiments 155-168, wherein the one or more amino acid substitutions comprise at least one substitution at position 31, optionally wherein the at least one substitution is selected from N31D, N31G, N31H, N31K, N31L, N31M, N31P, N31S, N31V, N31Y.

[0799] 170. The variant BCMA-Fc fusion protein of any of embodiments 155-169, wherein the one or more amino acid substitutions comprise at least one substitution at position 35, optionally wherein the at least one substitution is selected from L35A, L35M, L35P, L35S, L35V, L35Y.

[0800] 171. The variant BCMA-Fc fusion protein of any of embodiments 155-170, wherein the one or more amino acid substitutions comprise at least one substitution at position 36, optionally wherein the at least one substitution is selected from T36A, T36G, T36N, T36M, T36S, T36V.

[0801] 172. The variant BCMA-Fc fusion protein of any of embodiments 155-171, wherein the one or more amino acid substitutions are H19Y/S30G; H19Y/V45A; F14Y/H19Y; H19Y/V45D; H19Y/A43E; H19Y/T36A; H19Y/I22V; N11D/H19Y; H19Y/T36M; N11S/H19Y; H19Y/L35P/T46A; H19Y/N47D; S9D/H19Y; H19Y/S30G/V45D; H19Y/R39Q; H19Y/L35P; S9D/H19Y/R27H; Q10P/H19Y/Q25H; H19Y/R39L/N47D; N11D/H19Y/N47D; H19Y/T32S; N11S/H19Y/S29P; H19Y/R39Q/N47D; S16A/H19Y/R39Q; S9N/H19Y/N31K/T46I; H19Y/R27L/N31Y/T32S/T36A; N11S/H19Y/T46A; H19Y/T32I; S9G/H19Y/T36S/A43S; H19Y/S48G; S9N/H19Y/I22V/N31D; S9N/H19Y/Q25K/N31D; S9G/H19Y/T32S; H19Y/T36A/N47Y; H19Y/V45A/T46I; H19Y/Q25K/N31D; H19Y/Q25H/R39Q/V45D; H19Y/T32S/N47D; Q10E/H19Y/A20T/T36S; H19Y/T32S/V45I; H19F/Q25E/N31L/L35Y/T36S; H19F/Q25F/N31S/T36S; H19I/Q25F/N31S/T36V; H19F/Q25V/N31M/T36S; H19Y/Q25Y/N31L/L35Y/T36S; H19F/Q25I/N31M/L35A/T36S; H19I/Q25L/N31L/L35Y/T36S; H19F/Q25L/N31G/L35P/T36A; H19Y/I22L/N31G; H19F/I22V/Q25M/N31P/T36M; H19Y/N31L/L35Y/T36S; H19L/S30G/N31H/L35A; H19L/Q25S/N31V/L35S/T36V; H19L/Q25S/S30Y/N31G/L35M/T36V; H19F/Q25F/N31L/L35Y/T36S; H19F/Q25F/N31S/T36G; H19F/I22V/Q25S/N31V/L35S/T36V; H19F/Q25G/N31S/L35V/T36N; H19L/Q25H/N31D/L35S; or H19F/Q25F/N31S/L35Y/T36S.

[0802] 173. The variant BCMA-Fc fusion protein of any of embodiments 155-163, 167, and 172, wherein the one or more amino acid substitutions comprise S16A/H19Y/R39Q.

[0803] 174. The variant BCMA-Fc fusion protein of any of embodiments 155-173, wherein the variant BCMA polypeptide has increased binding affinity to one or both of APRIL and BAFF compared to the reference BCMA polypeptide.

[0804] 175. The variant BCMA-Fc fusion protein of any of embodiments 155-174, wherein the variant BCMA polypeptide has increased binding affinity to APRIL.

[0805] 176. The variant BCMA-Fc fusion protein of any of embodiments 155-174, wherein the variant BCMA polypeptide has increased binding affinity to BAFF.

[0806] 177. The variant BCMA-Fc fusion protein of any of embodiments 155-174, wherein the variant BCMA polypeptide has increased binding affinity to APRIL and BAFF.

[0807] 178. The variant BCMA-Fc fusion protein of any of embodiments 174-177, wherein the increased binding affinity for BAFF or APRIL is independently increased more than 1.2-fold, 1.5-fold, 2-fold, 3-fold, 4-fold, 5-fold, 6-fold, 7-fold, 8-fold, 9-fold, 10-fold, 20-fold, 30-fold, 40-fold, 50-fold or 60-fold.

[0808] 179. The variant BCMA-Fc fusion protein of any of embodiments 155-178, wherein the variant BCMA polypeptide comprises the sequence set forth in any one of SEQ ID NOS: 357-435.

[0809] 180. The variant BCMA-Fc fusion protein of any of embodiments 155-178, wherein the variant BCMA polypeptide consists or consists essentially of the sequence set forth in any one of SEQ ID NOS: 357-435.

[0810] 181. The variant BCMA-Fc fusion protein of any of embodiments 155-178, wherein the variant BCMA polypeptide consists or consists essentially of the sequence set forth in SEQ ID NO: 381.

[0811] 182. The variant BCMA-Fc fusion protein of any of embodiments 155-178, wherein the variant BCMA polypeptide consists or consists essentially of the sequence set forth in SEQ ID NO:411.

[0812] 183. The variant BCMA-Fc fusion protein of any of embodiments 155-178, wherein the variant BCMA polypeptide consists or consists essentially of the sequence set forth in SEQ ID NO:405.

[0813] 184. The variant BCMA-Fc fusion protein of any of embodiments 155-178, wherein the variant BCMA polypeptide consists or consists essentially of the sequence set forth in SEQ ID NO:406.

[0814] 185. The Fc fusion protein of any of embodiments 155-184, wherein the linker comprises a peptide linker and the peptide linker is selected from GSGGS (SEQ ID NO: 592), GGGGS (G4S; SEQ ID NO: 593), GSGGGGS (SEQ ID NO: 590), GGGGSGGGGS (2×GGGGS; SEQ ID NO: 594), GGGGSGGGGSGGGGS (3×GGGGS; SEQ ID NO: 595), GGGGSGGGGSGGGGSGGGGS (4×GGGGS, SEQ ID NO:600), GGGGSGGGGSGGGGSGGGGSGGGGS (5×GGGGS, SEQ ID NO: 671), GGGGSSA (SEQ ID NO: 596) or combinations thereof.

[0815] 186. The Fc fusion protein of any of embodiments 155-185 that is a dimer.

[0816] 187. The Fc fusion protein of any of embodiments 155-186, wherein the immunoglobulin Fc region is a homodimeric Fc region.

[0817] 188. The Fc fusion protein of any of embodiments 155-187, wherein the immunoglobulin Fc is an IgG1 Fc domain, or is a variant Fc that exhibits reduced binding affinity to an Fc receptor and/or reduced effector function, optionally as compared to a wild-type IgG1 Fc domain.

[0818] 189. The Fc fusion protein of any of embodiments 155-188, wherein the immunoglobulin Fc is an IgG1 Fc domain and the Fc comprises the amino acid sequence set forth in SEQ ID NO: 597.

[0819] 190. The Fc fusion protein of any of embodiments 155-188, wherein the immunoglobulin Fc is a variant IgG1 Fc domain comprising one or more amino acid substitutions selected from L234A, L234V, L235A, L235E, G237A, S267K, R292C, N297G, and V302C, by EU numbering.

[0820] 191. The Fc fusion protein of embodiment 190, wherein the immunoglobulin Fc region contains the amino acid substitutions L234A, L235E an G237A by EU numbering or the amino acid substitutions R292C, N297G and V302C by EU numbering.

[0821] 192. The Fc fusion protein of any of embodiments 155-191, wherein the immunoglobulin Fc is set forth in SEQ ID NO:586.

[0822] 193. The Fc fusion protein of any of embodiments 155-192, wherein the Fc is a variant Fc comprising the amino acid sequence set forth in SEQ ID NO:589.

[0823] 194. The Fc fusion protein of any of embodiments 155-193 that is a dimer.

[0824] 195. The Fc fusion protein of any of embodiments 155-194 that is a homodimer.

[0825] 196. The Fc fusion protein of any of embodiments 155-195, wherein the Fc fusion protein neutralizes APRIL and BAFF.

[0826] 197. The Fc fusion protein of any of embodiments 155-196, wherein:

[0827] the IC50 for neutralizing APRIL is less than 100 pM, less than 50 pM, less than 40 pM, less than 30 pM, less than 20 pM, less than 10 pM, less than 5 pM or less than 1 pM, or is any value between any of the foregoing; and/or

[0828] the IC50 for neutralizing BAFF is less than 400 pM, less than 300 pM, less than 200 pM, less than 100 pM, less than 75 pM, less than 50 pM, less than 25 pm, or less than 10 pM, or is any value between any of the foregoing.

[0829] 198. The Fc fusion protein of any of embodiments 155-196, wherein:

[0830] the Fc fusion protein blocks binding of APRIL, BAFF, or an APRIL/BAFF heterotrimer to BCMA or TACI; and/or

[0831] the Fc fusion protein reduces the levels of circulating APRIL, BAFF, or an APRIL/BAFF in the blood following administration to a subject.

[0832] 199. The Fc fusion protein of any of embodiments 155-198, wherein the immunomodulatory protein reduces or inhibits B cell maturation, differentiation and/or proliferation.

[0833] 200. A nucleic acid molecule(s) encoding the Fc fusion protein of any of embodiments 155-199.

[0834] 201. The nucleic acid molecule of embodiment 200 that is a synthetic nucleic acid.

[0835] 202. The nucleic acid molecule of embodiment 200 or embodiment 201 that is a cDNA.

[0836] 203. A vector, comprising the nucleic acid molecule of any of embodiments 200-202.

[0837] 204. The vector of embodiment 203 that is an expression vector.

[0838] 205. The vector of embodiment 203 or embodiment 204, wherein the vector is a mammalian expression vector or a viral vector.

[0839] 206. A cell, comprising the nucleic acid of any of embodiments 200-202 or the vector of any of any of embodiments 203-205.

[0840] 207. The cell of embodiment 206 that is a mammalian cell.

[0841] 208. The cell of embodiment 206 or embodiment 207 that is a human cell.

[0842] 209. A method of producing an Fc fusion protein, comprising introducing the nucleic acid molecule of any of embodiments 200-202 or vector of any of embodiments 203-205 into a host cell under conditions to express the protein in the cell.

[0843] 210. The method of embodiment 209, further comprising isolating or purifying the Fc fusion protein from the cell.

[0844] 211. An Fc fusion protein produced by the method of embodiment 209 or embodiment 210.

[0845] 212. A pharmaceutical composition, comprising the Fc fusion protein of any of embodiments 155-199 and 211.

[0846] 213. The pharmaceutical composition of embodiment 154 or embodiment 212, comprising a pharmaceutically acceptable excipient.

[0847] 214. The pharmaceutical composition of any of embodiments 154, 212 and 213, wherein the pharmaceutical composition is sterile.

[0848] 215. An article of manufacture comprising the pharmaceutical composition of any of embodiments 154 and 212-214 in a vial or container.

[0849] 216. The article of manufacture of embodiment 215, wherein the vial or container is sealed.

[0850] 217. A kit comprising the pharmaceutical composition of any of embodiments 154 and 212-214, and instructions for use.

[0851] 218. A kit comprising the article of manufacture of embodiment 215 or embodiment 216, and instructions for use.

[0852] 219. A method of reducing an immune response in a subject, comprising administering the immunomodulatory protein of any of embodiments 1-141 or 153 to a subject in need thereof.

[0853] 220. A method of reducing an immune response in a subject, comprising administering the Fc fusion protein of any of embodiments 155-199 and 211 to a subject in need thereof.

[0854] 221. A method of reducing an immune response in a subject, comprising administering the pharmaceutical composition of any of embodiments 154 and 211-214 to a subject in need thereof.

[0855] 222. The method of any of embodiments 219-221, wherein a B cell immune response is reduced in the subject, whereby B cell maturation, differentiation and/or proliferation is reduced or inhibited.

[0856] 223. The method of any of embodiments 219-222, wherein circulating levels of APRIL, BAFF or an APRIL/BAFF heterotrimer are reduced in the subject.

[0857] 224. A method of reducing circulating levels of APRIL, BAFF or an APRIL/BAFF heterotrimer in a subject comprising administering the pharmaceutical composition of any of embodiments 155 and 211-214 to the subject.

[0858] 225. The method of embodiment 128 or embodiment 221, wherein a T cell immune response is reduced in the subject, whereby T cell costimulation is reduced or inhibited.

[0859] 226. The method of any of embodiments 219-225, wherein reducing the immune response treats a disease or condition in the subject.

[0860] 227. A method of treating a disease or condition in a subject, comprising administering the immunomodulatory protein of any of embodiments 1-141 or 153 to a subject in need thereof.

[0861] 228. A method of treating a disease or condition in a subject, comprising administering the Fc fusion protein of any of claims 155-199 to a subject in need thereof.

[0862] 229. A method of treating a disease or condition in a subject, comprising administering the pharmaceutical composition of any of embodiments 154 and 211-214 to a subject in need thereof.

[0863] 230. The method of any of embodiments 224-227, wherein the disease or condition is an autoimmune disease, a B cell cancer, an antibody-mediated pathology, a renal disease, a graft rejection, graft versus host disease, or a viral infection.

[0864] 231. The method of embodiment 230, wherein the disease or condition is an autoimmune disease selected from the group consisting of Systemic lupus erythematosus (SLE); Sjögren's syndrome, scleroderma, Multiple sclerosis, diabetes, polymyositis, primary biliary cirrhosis, IgA nephropathy, optic neuritis, amyloidosis, antiphospholipid antibody syndrome (APS), autoimmune polyglandular syndrome type II (APS II), autoimmune thyroid disease (AITD), Graves' disease, autoimmune adrenalitis and pemphigus vulgaris.

[0865] 232. The method of embodiment 230, wherein the disease or condition is a B cell cancer and the cancer is myeloma.

### X. Examples

[0866] The following examples are included for illustrative purposes only and are not intended to limit the scope of the invention.

### Example 1. Generation and Assessment of Variant CTLA-4 Extracellular Domain Polypeptides as a T Cell Inhibitory Molecule (TIM)

[0867] This examples describes exemplary CTLA-4 polypeptide T cell inhibitory molecules (TIMs) that are employed as part of a provided multi-domain immunomodulatory protein with a B cell inhibitory molecule (BIM), including methods for engineering and identifying affinity-modified (variant) CTLA-4 polypeptides that bind (e.g. increased compared to wild-type) to ligands of a T cell stimulatory receptor.

[0868] Mutant DNA constructs of human CTLA-4 IgSF domains were generated for translation and expression on the surface of yeast as yeast display libraries.

[0869] Libraries containing random substitutions of amino acids were constructed to identify variants of the extracellular domain (ECD) of CTLA-4 containing an immunoglobulin superfamily (IgSF) domain (CTLA-4 vIgD) based on a wild-type human CTLA-4 sequence set forth in SEQ ID NO: 1 as follows:

(SEQ ID NO: 1)
[sequence omitted]

[0870] DNA encoding the wild-type CTLA-4 ECD was cloned between the BamHI and KpnI sites of the modified yeast display vector pBYDS03 (Life Technologies, USA). Mutations were introduced via error prone PCR utilizing the Genemorph II Kit (Agilent, USA) supplemented with MnCl₂ and using ECD-specific oligonucleotides which overlapped by 40 bp with pBYDS03 cloning vector beyond and including the BamHI and KpnI cloning sites. Mutagenized DNA PCR product was purified via agarose gel electrophoresis then further amplified using 100 ng of mutagenized PCR product with OneTaq 2× PCR Master Mix (New England Biolabs, USA). The products from the second PCR were purified via agarose gel electrophoresis and PCR-Gel purification (Qiagen, Germany) and resuspended in sterile deionized water. A total of 12 μg of PCR product was generated for each subsequent yeast electroporation.

[0871] To prepare for library insertion, pBYDS03 vector was digested with BamHI and KpnI restriction enzymes (New England Biolabs, USA) and the large vector fragment was gel-purified and dissolved in sterile, deionized water. Electroporation-ready DNA for the next step was generated by mixing 12 μg of library DNA insert with 4 μg of linearized vector in a total volume of 50 μL deionized and sterile water.

[0872] The CTLA-4 DNA libraries were introduced into yeast using electroporation. Briefly, electroporation-competent cells of yeast strain BJ5464 (ATCC.org; ATCC number 208288) were prepared and electroporated on a Gene Pulser II (Biorad, USA) with the electroporation-ready DNA from the steps above essentially as described (Colby, D. W. et al. 2004 Methods Enzymology 388, 348-358). The only exception is that transformed cells were grown in non-inducing minimal selective SCD-Leu medium to accommodate the LEU2 selectable marker carried by modified plasmid pBYDS03. One liter of SCD-Leu media was generated with 14.7 grams sodium citrate, 4.29 grams citric acid monohydrate, 20 grams dextrose, 6.7 grams yeast nitrogen base, and 1.6 grams yeast synthetic drop-out media supplement without leucine. The Medium was filter sterilized before use using a 0.22 m vacuum filter device.

[0873] Library size was determined by plating serial dilutions of freshly recovered cells on SCD-Leu agar plates and then extrapolating library size from the number of single colonies from plating that generated at least 50 colonies per plate. In general, library sizes ranged from 1.0×10⁸ to 1×10⁹ transformants based on this dilution assay. The remainder of the electroporated culture was grown to saturation in SCD-Leu and cells from this culture were subcultured (e.g., 1/100) into fresh SCD-Leu once more to minimize the fraction of untransformed cells, and grown overnight. To maintain library diversity, this subculturing step was carried out using an inoculum that contained at least 10 times more cells than the calculated library size. Cells from the second saturated culture were resuspended in fresh medium containing sterile 25% (weight/volume) glycerol to a density of 1×10¹⁰/mL and frozen and stored at −80° C. (frozen library stock).

[0874] Yeast, expressing affinity modified variants of CTLA-4 IgD were selected against ICOSL and/or CD86. A number of cells equal to at least 10 times the estimated library size were thawed from individual library stocks, suspended to 1.0×10⁶ cells/mL in non-inducing SCD-Leu medium, and grown overnight. The next day, a number of cells equal to 10 times the library size were centrifuged at 2000 RPM for two minutes and resuspended to 5.0×10⁶ cells/mL in inducing SCDG-Leu medium. One liter of the SCDG-Leu induction media consisted of 5.4 grams Na₂HPO₄, 8.56 grams of NaH₂PO₄·H₂O, 20 grams galactose, 2.0 grams dextrose, 6.7 grams yeast nitrogen base, and 1.6 grams of yeast synthetic drop out media supplement without leucine dissolved in water and sterilized through a 0.22 μm membrane filter device. The culture was grown in induction medium for 1 day at room temperature to induce expression of library proteins on the yeast cell surface.

[0875] The induced yeast library underwent 4 cycles of bead sorts using magnetic beads loaded alternately with ICOSL or CD86 to reduce non-binders and enrich for variant CTLA-4 molecules with the ability to bind ICOSL or CD86. After each cycle of selection, yeast retained through binding to magnetic beads were amplified through growth in SCD media followed by overnight induction in SCDG media. The preliminary selection was followed by two rounds of fluorescence activated cell sorting (FACS) using ICOSL-Fc in round 1 and CD86-Fc in round 2 to enrich the fraction of yeast cells that displays improved binders. Magnetic bead enrichment and selections by flow cytometry were carried out essentially as described in Miller et al., Current Protocols in Cytometry 4.7.1-4.7.30, July 2008.

[0876] This selection process utilized the following reagents and instruments: human rICOSL.Fc (i.e., recombinant ICOSL-Fc fusion protein) and human rCD86.Fc target ligand proteins were purchased from R & D Systems, USA. Magnetic Protein A beads were obtained from New England Biolabs, USA. For two-color, flow cytometric sorting, a Bio-Rad S3e sorter was used. CTLA-4 display levels were monitored with an anti-hemagglutinin antibody labeled with Alexafluor 488 (Life Technologies, USA). Ligand binding of Fc fusion proteins, rICOSL.Fc or rCD86.Fc, were detected with PE-conjugated human Ig specific goat Fab (Jackson ImmunoResearch, USA). Doublet yeast were gated out using forward scatter (FSC)/side scatter (SSC) parameters, and sort gates were based upon higher ligand binding detected in FL2 that possessed more limited tag expression binding in FL1.

[0877] Yeast outputs from the flow cytometric sorts were assayed for higher specific binding affinity. Sort output yeast were expanded and re-induced to express the particular IgSF affinity modified domain variants they encode. This population was then compared to the parental, wild-type yeast strain, or other selected outputs, such as the bead output yeast population, by flow cytometry.

[0878] After the second round of FACS the output was serially diluted and plated onto SCD-agar such that single clones could be isolated. Two hundred and eighty-eight colonies were picked into round bottom microtiter plates containing 150 μL SCD media supplemented with kanamycin, penicillin and streptomycin. Plates were incubated at 30° C. with shaking. After 4h of growth, 80 μL were transferred to wells of a new plate, cells were spun down, SCD removed, 200 μL of SCDG induction media supplemented with antibiotics were added to each well followed by overnight incubation at room temperature with shaking. FACS analysis was used to independently assess binding of each clone to rICOSL-Fc, rCD86-Fc and anti-HA Mab as a control for expression. Control wells of yeast bearing wildtype CTLA-4 were run on each plate. 16 clones were selected to be reformatted into Fc fusion constructs and sequenced as described below.

[0879] Sequence analysis of the 16 yeast clones revealed a single dominant combination of mutations (L12P/A26T/L63P/L98Q/Y105L; SEQ ID NO: 3). In order to generate additional clonal diversity and determine the minimal mutations required for enhanced binding, the mutations in this clone were partially shuffled with wildtype sequence. Briefly, three pairs of PCR primers were designed that divided the ECD coding region into thirds. The PCR primers maintained 20 bp overlapping sequence with adjacent PCR product in order to facilitate subsequent Gibson Assembly cloning. Three PCR products were generated from both wildtype A₁, B₁, C₁) and mutant template (A₂, B₂, C₂). Combinations of 3 PCR products, e.g. A₂, B1, C₁; A₂, B₂, C₁ etc., were mixed with a modified Fc fusion vector to carry out in vitro recombination using Gibson Assembly Mastermix (New England Biolabs, USA), which was subsequently used for heat shock transformation into E. coli strain NEB® 5-alpha. This shuffling with wildtype sequence yielded SEQ ID NOS: 4-10.

[0880] A second library of random mutations was generated via error prone PCR using the clones from Gen1 selection as template. This library, described as a Gen2, was constructed using the same process previously described except that template DNA was composed of a pool of Gen1 clones instead of wildtype CTLA-4 ECD DNA. The yeast library was screened via iterative rounds of FACS sorting, alternating between rICOSL-Fc and rCD86-Fc, to generate multiple pools of clones. As before, yeast pools were analyzed for binding via FACS. Based on the binding to rICOSL-Fc, rCD86-Fc, rCD80-Fc by FACS, several pools were selected for PCR cloning into the Fc vector. Subsequent sequence analysis and protein production were performed as described for Gen1.

[0881] Selection outputs were reformatted as immunomodulatory proteins containing an affinity-modified (variant) ECD of CTLA-4 fused to an Fc molecule (variant ECD-Fc fusion molecules). To generate recombinant immunomodulatory proteins that are Fc fusion proteins containing an ECD of CTLA-4 with at least one affinity-modified domain (e.g., variant CTLA-4 ECD-Fc), the encoding DNA was generated to encode a protein as follows: variant (mutant) ECD followed by a linker of 7 amino acids (GSGGGGS; SEQ ID NO:590) followed by a human IgG1 Fc containing the mutations L234A, L235E and G237A by EU numbering. Since the construct does not include any antibody light chains that can form a covalent bond with a cysteine, the human IgG1 Fc also contained replacement of the cysteine residues to a serine residue at position 220 (C220S) by EU numbering (corresponding to position 5 (C5S) with reference to the wild-type or unmodified Fc set forth in SEQ ID NO: 586). The Fc region also lacked the C-terminal lysine at position 447 (designated K447del) normally encoded in the wild type human IgG1 constant region gene (corresponding to position 232 of the wild-type or unmodified Fc set forth in SEQ ID NO: 586). The effectorless (inert) IgG1 Fc in the fusion constructs is set forth in SEQ ID 0:589:

SEQ ID NO: 589
EPKSSDKTHTCPPCPAPEAEGAPSVFLFPPKPKDT
LMISRTPEVTCVVVDVSHEDPEVKFNWYVDGVEVH
NAKTKPREEQYNSTYRVVSVLTVLHQDWLNGKEYK
CKVSNKALPAPIEKTISKAKGQPREPQVYTLPPSR
DELTKNQVSLTCLVKGFYPSDIAVEWESNGQPENN
YKTTPPVLDSDGSFFLYSKLTVDKSRWQQGNVFSC
SVMHEALHNHYTQKSLSLSPG

[0882] Output cells from final flow cytometric CTLA-4 sorts were grown to terminal density in SCD-Leu medium. Plasmid DNA from each output was isolated using a yeast plasmid DNA isolation kit (Zymoresearch, USA). For Fc fusions, PCR primers with added restriction sites suitable for cloning into the Fc fusion vector of choice were used to batch-amplify from the plasmid DNA preps the coding DNA for the mutant target ECDs. After restriction digestion, the PCR products were ligated into an appropriate Fc fusion vector followed by heat shock transformation into strain XL1-Blue E. coli (Agilent, USA) or NEB® 5-alpha (New England Biolabs) as directed by supplier. Alternatively, the outputs were PCR amplified with primers containing 40 bp overlap regions on either end with a modified Fc fusion vector to carry out in vitro recombination using Gibson Assembly Mastermix (New England Biolabs, USA), which was subsequently used for heat shock transformation into E. co/i strain NEB® 5-alpha. An exemplary Fc fusion vector is pFUSE-hIgG1-Fc2 (InvivoGen, USA).

[0883] Dilutions of transformation reactions were plated on LB-agar containing 100 μg/mL carbenicillin (Teknova, USA) to isolate single colonies for selection. Up to 96 colonies from each transformation were then grown in 96-well plates to saturation overnight at 37° C. in LB-broth (cat. #L8112, Teknova, USA), and a small aliquot from each well was submitted for DNA sequencing of the ECD insert in order to identify the mutation(s) in all clones. Sample preparation for DNA sequencing was carried out using protocols provided by the service provider (Genewiz; South Plainfield, N.J.). After removal of the sample for DNA sequencing, glycerol was added to the remaining cultures for a final glycerol content of 25%, and plates were stored at −20° C. for future use as master plates (see below). Alternatively, samples for DNA sequencing were generated by replica plating from grown liquid cultures to solid agar plates using a disposable 96-well replicator (VWR, USA). These plates were incubated overnight to generate growth patches and the plates were submitted to Genewiz for DNA sequencing following their specifications.

[0884] After analysis of Genewiz-generated DNA sequencing data, clones of interest were recovered from master plates and individually grown to saturation in 5 mL liquid LB-broth containing 100 μg/mL carbenicillin (Teknova, USA) and 2 mL of each culture were then used for preparation of approximately 10 μg of miniprep plasmid DNA of each clone using a standard kit such as the PureYield Plasmid Miniprep System (Promega, USA). Identification of clones of interest generally involved the following steps. First, DNA sequence data files were downloaded from the Genewiz website. All sequences were then manually curated so that they start at the beginning of the ECD coding region. The Genewiz sequences were processed to generate alignments using Ugene software (http://ugene.net).

[0885] Clones of interest were then identified using the following criteria: 1) identical clone occurs at least two times in the alignment, and 2) a mutation occurs at least two times in the alignment and preferably in distinct clones. Clones that met at least one of these criteria were enriched by the sorting process mostly likely due to improved binding.

[0886] The Fc-fusion proteins, containing variant ECDs of CTLA-4, were generated by high throughput expression and purification. Recombinant variant Fc fusion proteins were produced from suspension-adapted human embryonic kidney (HEK) 293 cells using the Expi293 expression system (Invitrogen, USA). 4 μg of each plasmid DNA were added to 200 μL Opti-MEM (Invitrogen, USA) at the same time as 10.8 μL ExpiFectamine were separately added to another 200 μL Opti-MEM. After 5 minutes, the 200 μL of plasmid DNA was mixed with the 200 μL of ExpiFectamine and was further incubated for an additional 20 minutes before adding this mixture to cells. Ten million Expi293 cells were dispensed into separate wells of a sterile 10 mL, conical bottom, deep 24-well growth plate (Thomson Instrument Company, USA) in a volume of 4 mL Expi293 media (Invitrogen, USA). Plates were shaken for 5 days at 120 RPM in a mammalian cell culture incubator set to 95% humidity and 8% CO₂. Following a 5-day incubation, cells were pelleted and culture supernatants were removed.

[0887] Protein was purified from supernatants using a high throughput 96-well Protein A purification kit using the manufacturer's protocol (Catalog number 45202, Life Technologies, USA). Resulting elution fractions were buffer-exchanged into PBS using Zeba 96-well spin desalting plate (Catalog number 89807, Life Technologies, USA) using the manufacturer's protocol. Purified protein was quantitated using 280 nm absorbance measured by Nanodrop instrument (Thermo Fisher Scientific, USA), and protein purity was assessed by loading 5 μg of protein on NUPAGE pre-cast, polyacrylamide gels (Life Technologies, USA) under denaturing and reducing conditions and subsequent gel electrophoresis. Proteins were visualized in gel using standard Coomassie staining.

[0888] Amino acid substitutions in selected CTLA-4 vIgDs that were identified by the selection are set forth in Table 3. Selected CTLA-4 vIgDs, formatted as Fc fusion proteins, were tested for binding and functional activity as described below.

[0889] A. Functional Characterization

[0890] Binding studies were performed to assess specificity and affinity of CTLA-4 vIgD-Fc fusion proteins for binding partners CD80, CD86, and ICOSL. The Fc-fusion variant proteins were further characterized for bioactivity in human primary T cells in vitro assays.

[0891] 1. Binding

[0892] To produce cells expressing a binding partner, full-length mammalian surface expression constructs for each of human CD80, CD86, and ICOSL were designed in pcDNA3.1 expression vectors (Life Technologies) and sourced from Genscript, USA. Binding studies were carried out using the Expi293F transient transfection system (Life Technologies, USA) described above. The number of cells needed for the experiment was determined, and the appropriate 30 mL scale of transfection was performed using the manufacturer's suggested protocol. For each counter structure or mock 30 mL transfection, 75 million Expi293F cells were incubated with 30 μg expression construct DNA and 1.5 mL diluted ExpiFectamine 293 reagent for 48 hours, at which point cells were harvested for staining.

[0893] For flow cytometric analysis, 200,000 cells of appropriate transient transfection or negative control were plated in 96 well round bottom plates. Cells were spun down and suspended in staining buffer (PBS (phosphate buffered saline), 1% BSA (bovine serum albumin), and 0.1% sodium azide) for 20 minutes to block non-specific binding. Afterwards, cells were centrifuged again and suspended in staining buffer containing 100 nM to 100 pM CTLA-4 IgSF variant Fc fusion protein in 50 μL. Primary staining was performed for 45 minutes, before washing cells in staining buffer twice. For CD86 transfections, bound protein was detected with PE-conjugated anti-human Fc (Jackson ImmunoResearch, USA) diluted 1:150 in 50 μL staining buffer incubated for 30 minutes. For CD80 and ICOSL transfections, bound protein was captured with anti-CTLA-4 antibody (Biolegend, USA) diluted 1:130 in 50 μL staining buffer. After a 30 minute incubation, cells were washed twice and detected with PE-conjugated anti-mouse Fc (Jackson ImmunoResearch, USA) diluted 1:150 in 50 μL for an additional 30 minute incubation. Cells were washed twice to remove unbound conjugated antibodies, fixed in 2% formaldehyde/PBS, and analyzed on a FACScan (Becton Dickinson, USA) or a Hypercyt flow cytometer (Intellicyte, USA).

[0894] Mean Fluorescence Intensity (MFI) was calculated for each transfectant and negative parental line with Cell Quest Pro software (Becton Dickinson, USA) or Forcyte software (Intellicyt, USA).

[0895] 2. Cytokine Production in Anti-CD3 Costimulation Assays

[0896] Soluble CTLA-4-Fc bioactivity was tested in a human Mixed Lymphocyte Reaction (MLR). Human primary dendritic cells (DC) generated by culturing monocytes isolated from PBMC (BenTech Bio, USA) in vitro for 7 days with 50 ng/mL rIL-4 (R&D Systems, USA) and 80 ng/mL rGM-CSF (R&D Systems, USA) in Ex-Vivo 15 media (Lonza, Switzerland). On days 3 and 5, half of the media was removed and replaced with fresh media containing 50 ng/mL rIL-4 and 80 ng/mL rGM-CSF. To fully induce DC maturation, lipopolysaccharide (LPS) (InvivoGen Corp., USA) was added at 100 ng/mL to the DC cultures on day 6 and cells were incubated for an additional 24 hours. Approximately, 10,000 matured DC and 100,000 purified allogeneic CD3+ T cells (BenTech Bio, USA) were co-cultured with CTLA-4 variant Fc fusion proteins and controls in 96 well round bottom plates in 200 μl final volume of Ex-Vivo 15 media. On day 4-5, IFN-gamma secretion in culture supermatants was analyzed using the Human IFN-gamma Duoset ELISA kit (R&D Systems, USA). Optical density was measured on a BioTek Cytation Multimode Microplate Reader (BioTek Corp., USA) and quantitated against titrated rIFN-gamma standard included in the IFN-gamma Duo-set kit (R&D Systems, USA).

[0897] 3. Results

[0898] The results of the binding and costimulatory bioactivity assays described above forth variant and unmodified CTLA-4 polypeptides are summarized in Tables E1-E3. The values for binding CD80, CD86, and ICOSL (MFI) and inteferon-gamma secretion [pg/mL] are provided in addition to the relative ratio, as compared to the corresponding binding and secretion ofthe unmodified CTLA-4 polypeptide (ΔWT) for each experiment. Relative ratios for binding that were substantially below 0.1, are reported as 0. In addition, MLR data for variants in which the variant suppressed the secretion of inteferon gamma to undetectable levels also is reported as 0.

TABLE E1
Binding and costimulatory bioactivity of variant CTLA-4-Fc polypeptides

| | SEQ | Binding | | | MLR |
|---|---|---|---|---|---|
| | ID | | | ICOSL | IFN-γ |
| | NO | CD80 MFI | CD86 MFI | MFI | [pg/mL] |
| Mutations | (ECD) | (Δ WT) | (Δ WT) | (Δ WT) | (Δ WT) |
| L12P/A26T/L63P/L98Q/Y105L | 3 | 829 (0.2) | 761890 (1.1) | 873 (0.5) | 216 (0.3) |
| L12P/A26T | 5 | 1024 (0.2) | 276276 (0.4) | 928 (0.6) | 850 (1.3) |
| L12P/A26T/L63P | 6 | 2400 (0.5) | 500345 (0.7) | 891 (0.5) | 671 (1.0) |
| L63P/L98Q/Y105L | 7 | 4718 (1.0) | 410571 (0.6) | 1802 (1.1) | 124 (0.2) |
| L98Q/Y105L | 8 | 3863 (0.8) | 685365 (1.0) | 1186 (0.7) | 124 (0.2) |
| L63P | 9 | 3932 (0.8) | 595807 (0.8) | 966 (0.6) | 261 (0.4) |
| L98R/N110K | 10 | 2110 (0.4) | 665012 (0.9) | 1046 (0.6) | 344 (0.5) |
| WT CTLA-4 | 1 | 4775 (1.0) | 708753 (1.0) | 1664 (1.0) | 662 (1.0) |

TABLE E2
Binding and costimulatory bioactivity of variant CTLA-4-Fc polypeptides

| | SEQ | Binding | | | MLR |
|---|---|---|---|---|---|
| | ID | CD80 | | ICOSL | IFN-γ |
| | NO | MFI | CD86 MFI | MFI | [pg/mL] |
| Mutations | (ECD) | (Δ WT) | (Δ WT) | (Δ WT) | (Δ WT) |
| L12P/A26T/L63P/L98Q/ | 11 | 2026 (0.4) | 33068 (0.9) | 1222 (0.7) | 569 (1.5) |
| M99L/Y105L | | | | | |
| E33M/Q82H/L98Q/M99L/ | 12 | 1098 (0.2) | 35506 (1.0) | 1792 (1.1) | 253 (0.7) |
| Y105L | | | | | |
| L63P/S72G/L98Q/M99L/ | 13 | 2591 (0.5) | 33477 (0.9) | 1604 (1.0) | 586 (1.6) |
| Y105L | | | | | |
| S14N/R16C/I18T/M56K/ | 14 | 3773 (0.8) | 30572 (0.8) | 990 (0.6) | 441 (1.2) |
| T61A/L63P/A86T/M99L | | | | | |
| S27P/M56K/L63P/S72G/ | 15 | 1982 (0.4) | 33467 (0.9) | 1354 (0.8) | 426 (1.1) |
| S73R/T89A/M99L/Y105L/ | | | | | |
| I117M | | | | | |
| M56K/L63P/N75D/V96I/ | 16 | 3775 (0.8) | 31296 (0.9) | 1719 (1.0) | 583 (1.6) |
| M99L/Y105L/L106I | | | | | |
| L63P/S72G/Y105L | 17 | 3831 (0.8) | 32160 (0.9) | 1362 (0.8) | 123 (0.3) |
| L63P/L98Q/M99L/Y105L/ | 18 | 2635 (0.6) | 32564 (0.9) | 1761 (1.1) | 539 (1.4) |
| I117M | | | | | |
| L63P/S72G/L98Q/M99L/ | 19 | 2463 (0.5) | 32830 (0.9) | 1930 (1.2) | 603 (1.6) |
| Y105L/L106I/I117L | | | | | |
| A26T/L63P/S72G/L98Q/ | 20 | 3576 (0.7) | 31549 (0.9) | 939 (0.6) | 83 (0.2) |
| Y105L/L106I/I117L | | | | | |
| L63P/L98Q/V116A | 21 | 2772 (0.6) | 32657 (0.9) | 1033 (0.6) | 298 (0.8) |
| G29W/L98Q/M99L/Y105L | 22 | 1772 (0.4) | 32977 (0.9) | 6183 (3.7) | 745 (2.0) |
| T37S/M56V/L98Q/Y105L | 23 | 2115 (0.4) | 27628 (0.8) | 881 (0.5) | 148 (0.4) |
| A26T/Y54F/M56K/M99L/ | 24 | 1526 (0.3) | 28149 (0.8) | 1113 (0.7) | 552 (1.5) |
| Y105L | | | | | |
| L12P/I18T/A26T/M55T/ | 25 | 1577 (0.3) | 25936 (0.7) | 931 (0.6) | 944 (2.5) |
| T69S/S72G/M99L/Y105L | | | | | |
| V22I/L63P/L98Q/Y105L/ | 26 | 2802 (0.6) | 27629 (0.8) | 1013 (0.6) | 103 (0.3) |
| I117M | | | | | |
| A26T/L63P/S72G/L98Q/ | 27 | 2899 (0.6) | 26407 (0.7) | 1759 (1.1) | 195 (0.5) |
| M99L/Y105L | | | | | |
| I18T/T61R/L63P/S72G/ | 190 | 1140 (0.2) | 46974 (1.3) | 935 (0.6) | 714 (1.9) |
| L98Q/M99L/P102L/Y105L | | | | | |
| E33M/A42T/L98Q/Y105L | 28 | 1623 (0.3) | 27354 (0.7) | 1675 (1.0) | 638 (1.7) |
| M55T/E97Q/M99L/Y105F | 29 | 906 (0.2) | 6249 (0.2) | 1037 (0.6) | 575 (1.5) |
| M55T/S72G/L98Q/M99L/ | 30 | 1940 (0.4) | 30594 (0.8) | 2313 (1.4) | 594 (1.6) |
| Y105L | | | | | |
| R16C/G29W/E33V/M55T/ | 31 | 2678 (0.6) | 28858 (0.8) | 1480 (0.9) | 144 (0.4) |
| L63P/L98Q/Y105L | | | | | |
| L12P/A26T/L63P/L98Q/ | 32 | 2318 (0.5) | 28463 (0.8) | 879 (0.5) | 127 (0.3) |
| Y105L/L106I | | | | | |
| M56L/L63P/L98Q/Y105L/ | 33 | 3487 (0.7) | 32054 (0.9) | 963 (0.6) | 72 (0.2) |
| L106I/I117L | | | | | |
| S15P/I18V/M56T/L98Q/ | 34 | 1445 (0.3) | 33793 (0.9) | 1505 (0.9) | 622 (1.7) |
| M99L/Y105L | | | | | |
| I18T/G29W/L63P/L98Q/ | 35 | 10109 | 29367 (0.8) | 1711 (1.0) | 50 (0.1) |
| Y105L | | (2.1) | | | |
| L63P/Q82H/L98Q/M99L/ | 36 | 2777 (0.6) | 31740 (0.9) | 2110 (1.3) | 723 (1.9) |
| Y105L | | | | | |
| L98Q/M99L/Y105L/L106I/ | 37 | 1117 (0.2) | 28174 (0.8) | 1081 (0.6) | 944 (2.5) |
| I117T | | | | | |
| L98Q/M99L/Y105L/L106I/ | 38 | 1074 (0.2) | 27514 (0.7) | 939 (0.6) | 322 (0.9) |
| Y115N | | | | | |
| M55T/L63P/T71I/M99L/ | 39 | 2900 (0.6) | 24010 (0.7) | 1125 (0.7) | 384 (1.0) |
| Y105L | | | | | |
| A26T/T53S/M56K/L63P/ | 40 | 3352 (0.7) | 23688 (0.6) | 1042 (0.6) | 88 (0.2) |
| L98Q/Y105L | | | | | |
| I18T/A26T/L63P/Q82R/ | 41 | 3650 (0.8) | 26133 (0.7) | 923 (0.6) | 105 (0.3) |
| L98Q/Y105L | | | | | |
| L12H/M55T/E59D/L63P/ | 42 | 2877 (0.6) | 26206 (0.7) | 876 (0.5) | 619 (1.7) |
| M99L | | | | | |
| I18T/L63P/S72G/L98Q/ | 43 | 2706 (0.6) | 26196 (0.7) | 960 (0.6) | 62 (0.2) |
| Y105L/I108V | | | | | |
| I18T/L63P/S72G/L98Q/ | 44 | 2442 (0.5) | 29111 (0.8) | 2489 (1.5) | 817 (2.2) |
| M99L/Y105L | | | | | |
| T61A/L63P/S72G/L98Q/ | 45 | 2505 (0.5) | 32390 (0.9) | 1987 (1.2) | 944 (2.5) |
| M99L/Y105L | | | | | |
| V38I/L63P/S72G/L98Q/ | 46 | 3433 (0.7) | 33373 (0.9) | 2410 (1.4) | 846 (2.3) |
| M99L/Y105L | | | | | |
| L63P/S72G/I93L/L98Q/ | 47 | 3282 (0.7) | 32885 (0.9) | 2277 (1.4) | 897 (2.4) |
| M99L/Y105L | | | | | |
| L12I/M55T/M56V/I67T/ | 48 | 2917 (0.6) | 31744 (0.9) | 2485 (1.5) | 842 (2.3) |
| M99L/L106R/I108F | | | | | |
| I18N/A26T/L63H/T89A/ | 49 | 1943 (0.4) | 31558 (0.9) | 2175 (1.3) | 689 (1.8) |
| L98Q/M99L/Y105L | | | | | |
| I18T/E48R/L63P/T69S/ | 50 | 1086 (0.2) | 23508 (0.6) | 1124 (0.7) | 645 (1.7) |
| L98Q/Y105L/N110Y | | | | | |
| I18N/L63P/S72T/M87T/ | 51 | 1998 (0.4) | 36385 (1.0) | 1032 (0.6) | 73 (0.2) |
| L98Q/Y105L/N110S | | | | | |
| G29W/M56T/L63P/L98Q/ | 52 | 3308 (0.7) | 32787 (0.9) | 1258 (0.8) | 78 (0.2) |
| Y105L/L106I/I117L | | | | | |
| G29W/N58S/L63P/M87T/ | 53 | 3381 (0.7) | 32622 (0.9) | 3622 (2.2) | 578 (1.6) |
| L98Q/M99L/Y105L | | | | | |
| G29W/N58S/L63P/D64N/ | 54 | 3750 (0.8) | 33612 (0.9) | 2158 (1.3) | 227 (0.6) |
| L98Q/M99L/Y105L | | | | | |
| I18T/L63P/S72G/M87K/ | 55 | 2925 (0.6) | 35032 (1.0) | 1999 (1.2) | 679 (1.8) |
| L98Q/M99L/Y105L | | | | | |
| WT CTLA-4 | 1 | 4775 (1.0) | 36785 (1.0) | 1664 (1.0) | 373 (1.0) |

TABLE E3
Binding and costimulatory bioactivity of variant CTLA-4-Fc polypeptides

| | | Binding | | | MLR |
|---|---|---|---|---|---|
| | SEQ ID | | | ICOSL | IFN-γ |
| | NO | CD80 MFI | CD86 MFI | MFI | [pg/mL] |
| Mutations | (ECD) | (Δ WT) | (Δ WT) | (Δ WT) | (Δ WT) |
| M56V | 56 | 2688 (0.6) | 36766 (0.1) | 822 (0.5) | 176 (1.3) |
| L63P/K95R | 57 | 2914 (0.6) | 33412 (0.0) | 819 (0.5) | 165 (1.2) |
| L63P/L98Q | 58 | 2830 (0.6) | 31416 (0.0) | 885 (0.5) | 229 (1.6) |
| L98Q/M99L/Y105L | 59 | 1472 (0.3) | 33977 (0.0) | 1541 (0.9) | 325 (2.3) |
| L63P/M87K/M99L/ | 60 | 3329 (0.7) | 61526 (0.1) | 2540 (1.5) | 531 (3.8) |
| L106R | | | | | |
| L63P/M99L/Y105L/ | 61 | 2142 (0.4) | 32781 (0.0) | 3759 (2.3) | 1053 (7.5) |
| I108F | | | | | |
| V10A/L63P/L98Q/ | 62 | 3148 (0.7) | 34595 (0.0) | 869 (0.5) | 141 (1.0) |
| Y105L | | | | | |
| M56T/L91R/L98Q/ | 63 | 1713 (0.4) | 33645 (0.0) | 1128 (0.7) | 0 (0.0) |
| Y105L | | | | | |
| A26T/L63P/M87V/ | 64 | 2909 (0.6) | 31487 (0.0) | 973 (0.6) | 426 (3.0) |
| N110K/I117E | | | | | |
| G29W/L63P/L98Q/ | 65 | 5165 (1.1) | 37721 (0.1) | 3023 (1.8) | 438 (3.1) |
| M99L/Y105L | | | | | |
| A26T/V46E/L63P/ | 66 | 5009 (1.0) | 38407 (0.1) | 888 (0.5) | 273 (1.9) |
| D65G/L98Q | | | | | |
| G29W/N58S/L63P/ | 67 | 15619 (3.3) | 34897 (0.0) | 1374 (0.8) | 0 (0.0) |
| L98Q/Y105L | | | | | |
| G29W/E59G/L63P/ | 68 | 3214 (0.7) | 32786 (0.0) | 1148 (0.7) | 0 (0.0) |
| L98Q/Y105L | | | | | |
| L12H/L63P/S72G/ | 69 | 2034 (0.4) | 31843 (0.0) | 857 (0.5) | 87 (0.6) |
| L98Q/Y105L | | | | | |
| A6T/A26T/M55T/ | 70 | 1429 (0.3) | 33589 (0.0) | 938 (0.6) | 472 (3.4) |
| M99L/Y105L | | | | | |
| A26T/L63P/D65G/ | 71 | 2324 (0.5) | 33672 (0.0) | 2200 (1.3) | 264 (1.9) |
| L98Q/M99L/Y105L | | | | | |
| V10A/L63P/D64V/ | 72 | 2598 (0.5) | 33868 (0.0) | 2502 (1.5) | 904 (6.4) |
| S72G/L98Q/M99L/Y105L | | | | | |
| L12P/G29W/D43N/ | 73 | 1486 (0.3) | 30004 (0.0) | 1276 (0.8) | 352 (2.5) |
| N58S/L63P/L98Q/M99L/ | | | | | |
| Y105L | | | | | |
| I18V/A26T/L63P/D64E/ | 74 | 4096 (0.9) | 30852 (0.0) | 17220 (10.3) | 0 (0.0) |
| L98Q/Y105L/L106R/ | | | | | |
| N110K | | | | | |
| A19V/G29W/R35K/ | 75 | 2349 (0.5) | 33255 (0.0) | 3119 (1.9) | 445 (3.2) |
| L63P/L98Q/M99L/Y105L | | | | | |
| L12P/A26T/L63P/S72G/ | 76 | 1833 (0.4) | 924222 (1.3) | 919 (0.6) | 536 (3.8) |
| T89M/L98Q/M99L/ | | | | | |
| Y105L | | | | | |
| P28L/E33V/L63P/S72G/ | 77 | 1441 (0.3) | 782025 (1.1) | 966 (0.6) | 535 (3.8) |
| L98R/M99L/Y105L | | | | | |
| E24Q/L63P/S72G/ | 78 | 2864 (0.6) | 729343 (1.0) | 1080 (0.6) | 867 (6.2) |
| L98Q/M99L/Y105L | | | | | |
| I18T/G29R/L63P/S72G/ | 79 | 3592 (0.8) | 857127 (1.2) | 1014 (0.6) | 366 (2.6) |
| L98Q/M99L/Y105L | | | | | |
| L63P/L98Q/M99L/ | 80 | 2662 (0.6) | 618249 (0.9) | 868 (0.5) | 944 (6.7) |
| Y105L | | | | | |
| Q41L/Y54F/M56K/ | 81 | 2570 (0.5) | 703731 (1.0) | 940 (0.6) | 408 (2.9) |
| M99L/I108F | | | | | |
| S72G/L98Q/M99L/ | 82 | 1374 (0.3) | 863538 (1.2) | 968 (0.6) | 221 (1.6) |
| Y105L/I117T | | | | | |
| M56R/L63P/L98Q/ | 83 | 2546 (0.5) | 911035 (1.3) | 839 (0.5) | 1198 (8.5) |
| M99L/Y105L | | | | | |
| E33M/L63P/S72G/ | 84 | 1532 (0.3) | 518203 (0.7) | 999 (0.6) | 1220 (8.7) |
| L98Q/Y105L | | | | | |
| L63P/L98Q/M99L/ | 85 | 2814 (0.6) | 1007606 (1.4) | 1004 (0.6) | 773 (5.5) |
| Y105L/L106I | | | | | |
| A26T/M55R/L98Q/ | 86 | 2324 (0.5) | 520232 (0.7) | 986 (0.6) | 468 (3.3) |
| M99L/Y105L | | | | | |
| L63P/S72G/M87A/ | 87 | 2769 (0.6) | 349875 (0.5) | 875 (0.5) | 202 (1.4) |
| L98Q/Y105L | | | | | |
| A26D/S72G/L98Q/M99L/ | 88 | 5409 (1.1) | 578704 (0.8) | 1235 (0.7) | 1097 (7.8) |
| Y105L | | | | | |
| V22A/L63P/L98Q/M99L/ | 89 | 2820 (0.6) | 642849 (0.9) | 992 (0.6) | 1174 (8.4) |
| Y105L/P119H | | | | | |
| A26T/M55T/L63P/L98Q/ | 90 | 3203 (0.7) | 850654 (1.2) | 875 (0.5) | 1096 (7.8) |
| M99L/Y105L | | | | | |
| E33V/A42S/M55T/L98Q/ | 91 | 2195 (0.5) | 929792 (1.3) | 1043 (0.6) | 1478 (10.5) |
| M99L/Y105L | | | | | |
| G29W/N58S/L63P/Q82R/ | 92 | 18277 (3.8) | 950639 (1.3) | 1463 (0.9) | 0 (0.0) |
| L98Q/Y105L | | | | | |
| E33M/L63P/S72G/L98Q/ | 93 | 2293 (0.5) | 912480 (1.3) | 907 (0.5) | 586 (4.2) |
| Y105L/I117L | | | | | |
| A26T/I67N/S72G/L98Q/ | 94 | 1740 (0.4) | 976150 (1.4) | 948 (0.6) | 1331 (9.5) |
| M99L/Y105L | | | | | |
| L12F/A26T/L63P/L98Q/ | 95 | 2186 (0.5) | 984573 (1.4) | 867 (0.5) | 1286 (9.2) |
| Y105L/L106R | | | | | |
| S20N/A26T/L63P/L98Q/ | 96 | 3707 (0.8) | 941466 (1.3) | 1020 (0.6) | 1879 (13.4) |
| M99L/Y105L | | | | | |
| G29W/T61I/L63P/S72G/ | 97 | 3446 (0.7) | 842791 (1.2) | 1024 (0.6) | 718 (5.1) |
| L98Q/M99L/Y105L | | | | | |
| G29W/N58S/L63P/T69I/ | 98 | 4558 (1.0) | 841939 (1.2) | 1945 (1.2) | 1036 (7.4) |
| L98Q/M99L/Y105L | | | | | |
| L12P/L63P/S72G/L98Q/ | 99 | 2991 (0.6) | 854863 (1.2) | 894 (0.5) | 0 (0.0) |
| M99L/Y105L/L106N | | | | | |
| L63P/T69A/L98Q/M99L/ | 100 | 3984 (0.8) | 831276 (1.2) | 1765 (1.1) | 0 (0.0) |
| Y105L/L106R/V116A | | | | | |
| G29W/N58S/L63P/ | 101 | 4262 (0.9) | 860194 (1.2) | 1445 (0.9) | 0 (0.0) |
| S72G/L98Q/Y105L | | | | | |
| G29W/L63P/D65G/ | 102 | 3399 (0.7) | 854339 (1.2) | 954 (0.6) | 0 (0.0) |
| S72G/L98Q/Y105L | | | | | |
| T53S/M56V/L98Q/ | 103 | 3860 (0.8) | 875378 (1.2) | 1376 (0.8) | 0 (0.0) |
| Y105L | | | | | |
| L63P/S72G/L98Q/Y105L | 104 | 3451 (0.7) | 892268 (1.3) | 1486 (0.9) | 0 (0.0) |
| I18A/L63P/S72G/L98Q/ | 105 | 3542 (0.7) | 637802 (0.9) | 1240 (0.7) | 0 (0.0) |
| Y105L | | | | | |
| G29W/T53S/M56K/ | 106 | 3347 (0.7) | 794165 (1.1) | 1914 (1.2) | 179 (1.3) |
| L63P/L98Q/Y105L | | | | | |
| I18V/G29W/L63P/ | 107 | 4064 (0.9) | 797318 (1.1) | 1351 (0.8) | 0 (0.0) |
| S72G/L98Q/Y105L | | | | | |
| G29W/L63P/S72G/ | 108 | 4303 (0.9) | 829524 (1.2) | 1474 (0.9) | 0 (0.0) |
| L98Q/Y105L/L106I | | | | | |
| G29W/L63P/I67V/ | 109 | 3993 (0.8) | 769557 (1.1) | 1053 (0.6) | 0 (0.0) |
| S72G/L98Q/Y105L | | | | | |
| G29W/M55V/E59G/ | 110 | 4174 (0.9) | 427427 (0.6) | 1248 (0.7) | 0 (0.0) |
| L63P/L98Q/Y105L | | | | | |
| G29W/L63P/S72G/ | 111 | 3794 (0.8) | 502885 (0.7) | 1853 (1.1) | 0 (0.0) |
| L98Q/Y105L/I117L | | | | | |
| L63P/S72G/L98Q/ | 112 | 3811 (0.8) | 789352 (1.1) | 1885 (1.1) | 37 (0.3) |
| Y105L/L106I/I117L | | | | | |
| L12F/R16H/G29W/ | 113 | 6575 (1.4) | 919746 (1.3) | 2615 (1.6) | 0 (0.0) |
| M56T/L98Q/Y105L | | | | | |
| L12P/G29W/L63P/ | 114 | 4012 (0.8) | 783049 (1.1) | 1001 (0.6) | 155 (1.1) |
| S72G/L98Q/Y105L | | | | | |
| L12P/G29W/L63P/S72G/ | 115 | 4347 (0.9) | 662327 (0.9) | 1219 (0.7) | 195 (1.4) |
| L98Q/Y105L/L106I | | | | | |
| G29W/L63P/S72G/L98Q/ | 116 | 3242 (0.7) | 702231 (1.0) | 1205 (0.7) | 133 (0.9) |
| Y105L/L106I/I117L | | | | | |
| A26T/T53S/L63P/L98Q/ | 118 | 4853 (1.0) | 713974 (1.0) | 2111 (1.3) | 0 (0.0) |
| Y105L/L106I/I117L | | | | | |
| G29W/N58S/L63P/S72G/ | 119 | 4044 (0.8) | 818528 (1.2) | 1572 (0.9) | 0 (0.0) |
| M87V/L98Q/Y105L | | | | | |
| G29W/S72G/Q76R/L98Q/ | 120 | 2421 (0.5) | 842313 (1.2) | 2147 (1.3) | 1129 (8.1) |
| Y105L/L106I/Q113H | | | | | |
| G29W/N58S/L63P/S72G/ | 121 | 1233 (0.3) | 931184 (1.3) | 1045 (0.6) | 844 (6.0) |
| L98Q/Y105L/L106V | | | | | |
| A26T/L63P/L98Q/M99L/ | 122 | 3095 (0.6) | 762915 (1.1) | 1863 (1.1) | 1059 (7.6) |
| Y105L | | | | | |
| G29W/N58D/I67V/L98Q/ | 123 | 2460 (0.5) | 898877 (1.3) | 4222 (2.5) | 373 (2.7) |
| M99L/Y105L | | | | | |
| I67V/S72G/Q82H/T89A/ | 124 | 1729 (0.4) | 865295 (1.2) | 5692 (3.4) | 786 (5.6) |
| L98Q/M99L/Y105L | | | | | |
| S72G/R85G/L98Q/M99L/ | 125 | 1439 (0.3) | 905813 (1.3) | 4653 (2.8) | 915 (6.5) |
| Y105L/L106I | | | | | |
| L63P/L98Q/M99L/ | 80 | 2787 (0.6) | 824331 (1.2) | 1723 (1.0) | 692 (4.9) |
| Y105L | | | | | |
| A26T/T47A/M56K/ | 126 | 2432 (0.5) | 835548 (1.2) | 2767 (1.7) | 404 (2.9) |
| L63P/S72G/Q82R/L98Q/ | | | | | |
| M99L/Y105L | | | | | |
| A26T/M55T/L63P/ | 127 | 3226 (0.7) | 1085961 (1.5) | 2090 (1.3) | 1413 (10.1) |
| S72G/L98Q/M99L/Y105L | | | | | |
| L12H/I18V/A42T/M55T/ | 128 | 1764 (0.4) | 896733 (1.3) | 733 (0.4) | 170 (1.2) |
| N58D/L98R/Y105L/ | | | | | |
| L106I/P121S | | | | | |
| I18T/A26T/L63P/S72G/ | 129 | 3265 (0.7) | 769820 (1.1) | 802 (0.5) | 145 (1.0) |
| L98Q/Y105L | | | | | |
| L12F/K30R/S72G/ | 130 | 1208 (0.3) | 766257 (1.1) | 1747 (1.0) | 718 (5.1) |
| Q82R/L98Q/M99L/Y105L | | | | | |
| L12P/L63P/S72G/L98Q/ | 131 | 987 (0.2) | 782940 (1.1) | 998 (0.6) | 623 (4.4) |
| M99L/Y105L/L106N/ | | | | | |
| I117L | | | | | |
| G29W/M87K/I93V/L98Q/ | 132 | 2019 (0.4) | 767081 (1.1) | 7975 (4.8) | 786 (5.6) |
| M99L/Y105L | | | | | |
| P28L/E33V/L63P/S72G/ | 133 | 1163 (0.2) | 798068 (1.1) | 1849 (1.1) | 1161 (8.3) |
| L98Q/M99L/Y105L | | | | | |
| G29W/T53S/M56K/L63P/ | 134 | 4087 (0.9) | 425068 (0.6) | 5654 (3.4) | 956 (6.8) |
| Q82H/L98Q/M99I/ | | | | | |
| Y105L | | | | | |
| I18F/L63P/L98Q/M99L/ | 135 | 2392 (0.5) | 486401 (0.7) | 1765 (1.1) | 737 (5.3) |
| Y105L/P121S | | | | | |
| L63P/L98Q/M99L/Y105L/ | 136 | 3455 (0.7) | 730161 (1.0) | 2074 (1.2) | 592 (4.2) |
| I108V | | | | | |
| A26T/A42V/Q45H/I67N/ | 137 | 10573 (2.2) | 610530 (0.9) | 24030 (14.4) | 1282 (9.1) |
| M87K/E97Q/M99L | | | | | |
| E33M/L63P/S72G/L98Q/ | 84 | 1984 (0.4) | 933740 (1.3) | 2401 (1.4) | 1849 (13.2) |
| Y105L | | | | | |
| M56V/E59G/L63P/S72G/ | 138 | 1940 (0.4) | 758136 (1.1) | 1552 (0.9) | 332 (2.4) |
| M87K/I93V/L98Q/ | | | | | |
| M99L/Y105L/I17E | | | | | |
| G29W/M87K/T89S/L98Q/ | 139 | 3525 (0.7) | 913043 (1.3) | 9533 (5.7) | 232 (1.7) |
| M99L/Y105L/I108V/ | | | | | |
| I117L | | | | | |
| L12P/M56V/L63P/V96I/ | 140 | 1647 (0.3) | 891092 (1.3) | 1059 (0.6) | 907 (6.5) |
| L98Q/M99L/Y105L/ | | | | | |
| Y115H | | | | | |
| G29W/T53S/M56K/T61N/ | 141 | 3375 (0.7) | 919607 (1.3) | 1454 (0.9) | 0 (0.0) |
| L63P/L98Q/Y105L | | | | | |
| I18T/A26S/M55T/M56V/ | 142 | 2455 (0.5) | 782684 (1.1) | 1686 (1.0) | 530 (3.8) |
| L63P/S72G/L98Q/ | | | | | |
| M99L/Y105L/I117K | | | | | |
| I18T/T61R/L63P/S72G/ | 143 | 3315 (0.7) | 926617 (1.3) | 2390 (1.4) | 296 (2.1) |
| L98Q/M99L/Y105L | | | | | |
| L12P/L63P/S72G/L98Q/ | 144 | 1784 (0.4) | 1045369 (1.5) | 1510 (0.9) | 968 (6.9) |
| M99L/Y105L | | | | | |
| E33M/L63P/S72G/L98 | 145 | 1481 (0.3) | 820016 (1.2) | 2109 (1.3) | 766 (5.5) |
| Q/Y105L/I108F | | | | | |
| L12P/R16H/A26T/T61S/ | 146 | 1926 (0.4) | 895016 (1.3) | 1046 (0.6) | 593 (4.2) |
| L63P/M87V/L98Q/ | | | | | |
| M99L/Y105L/L106I/I117L | | | | | |
| G29W/T53S/M56K/ | 147 | 7819 (1.6) | 778254 (1.1) | 2249 (1.4) | 0 (0.0) |
| N58S/L63P/M87V/L98Q/ | | | | | |
| Y105L/P121S | | | | | |
| G29W/L63P/S72G/L98Q/ | 148 | 3395 (0.7) | 763120 (1.1) | 1559 (0.9) | 0 (0.0) |
| Y105L/P121S | | | | | |
| G29W/T53S/M56K/N58S/ | 149 | 8116 (1.7) | 257214 (0.4) | 2517 (1.5) | 0 (0.0) |
| L63P/M87V/L98Q/ | | | | | |
| Y105L | | | | | |
| G29W/T53S/M56K/ | 150 | 7775 (1.6) | 271930 (0.4) | 3703 (2.2) | 45 (0.3) |
| N58S/L63P/M87V/L98Q/ | | | | | |
| Y105L/I108V | | | | | |
| G29W/T53S/L63P/S72G/ | 151 | 4497 (0.9) | 174601 (0.2) | 1545 (0.9) | 0 (0.0) |
| L98Q/Y105L | | | | | |
| V10A/G29W/T53S/ | 152 | 6058 (1.3) | 766570 (1.1) | 1612 (1.0) | 0 (0.0) |
| M56K/L63P/L98Q/Y105L/ | | | | | |
| P121S | | | | | |
| WT CTLA-4 | 1 | 4775 (1.0) | 708753 (1.0) | 1664 (1.0) | 140 (1.0) |

### Example 2. Generation and Assay of CTLA-4 Consensus Variants

[0899] Additional variants of CTLA-4 ECD were designed by identifying consensus residues identified in the screen described in Example 1 that were commonly associated with variants that exhibited improved CD80, CD86, and/or ICOSL binding and/or demonstrated suppression of interferon-gamma secretion in the MLR assay. The selected consensus mutations included 118T, A26T, E33V, T53S, M55T, M56K, N58S, L63P, M87V, L98Q, M99L, and Y105L. The consensus mutants were used to generate variant CTLA-4 ECDs by site-directed mutagenesis with reference to the wild-type sequence set forth in SEQ ID NO: 1, which was then formatted as an Fc fusion protein as described in Example 1. The variant CTLA-4 ECD-Fc fusions were tested for binding and bioactivity as described below.

[0900] A. Binding and Bioactivity

[0901] 1. Binding to Cell-Expressed Counter Structures

[0902] To produce cells expressing cognate binding partners, full-length mammalian surface expression constructs for each of human CD80, CD86, and ICOSL were designed in pcDNA3.1 expression vector (Life Technologies) and sourced from Genscript, USA. Binding studies were carried out using the Expi293F transient transfection system (Life Technologies, USA) described above. The number of cells needed for the experiment was determined, and the appropriate 30 mL scale of transfection was performed using the manufacturer's suggested protocol. For each counter structure or mock 30 mL transfection, 75 million Expi293F cells were incubated with 30 μg expression construct DNA and 1.5 mL diluted ExpiFectamine™ 293 reagent for 48 hours, at which point cells were harvested for staining.

[0903] In some instances, cells with stable expression of cognate binding partners were used. Chinese hamster ovarian cells (CHO) were stably transduced by lentivirus for surface expression of full-length human CD80, CD86, or ICOSL.

[0904] For flow cytometric analysis, 200,000 cells of a given transient transfection, stable cell line, or appropriate negative control were plated in 96 well round bottom plates. Cells were spun down and suspended in staining buffer (PBS (phosphate buffered saline), 1% BSA (bovine serum albumin), and 0.1% sodium azide) for 20 minutes to block non-specific binding. Afterwards, cells were centrifuged again and suspended in staining buffer containing 100 nM to 100 pM CTLA-4 variant Fc fusion protein or control in 50 μL. Primary staining was performed for 45 minutes, before washing cells in staining buffer twice. Bound CTLA-4 was detected with PE-conjugated anti-human IgG (Jackson ImmunoResearch, USA) diluted 1:150 in 50 μL staining buffer and incubated for 30 minutes. Alternatively, bound CTLA-4 was detected with anti-CTLA-4 antibody (Biolegend, USA) diluted 1:130 in 50 μL staining buffer for 30 minutes, before washing cells in staining buffer twice. Anti-CTLA-4 antibody was then detected with PE-conjugated anti-mouse IgG (Jackson ImmunoResearch, USA) diluted 1:150 in 50 μL staining buffer and incubated for 30 minutes.

[0905] After final incubation, cells were washed twice to remove unbound conjugated antibodies, fixed in 2% formaldehyde/PBS, and analyzed on a Hypercyt (Intellicyte, USA) or LSRII (Becton Dickinson, USA) flow cytometer.

[0906] Mean Fluorescence Intensity (MFI) was calculated for each sample with Cell Quest Pro software (Becton Dickinson, USA), FlowJo software (FlowJo, USA), or Forcyte software (Intellicyt, USA).

[0907] a. CD86 Blockade Bioassay

[0908] Select CTLA-4 variant Fc fusion proteins were assayed for capacity to block CD86-CD28 mediated costimulation as determined by a CD86 blockade bioassay. Artificial antigen presenting cells (APCs) were generated by transducing K562 cells with lentivirus to express cell surface anti-human CD3 single chain Fv (OKT3) and human CD86, yielding K562/OKT3/CD86. Effector cells were generated by transducing Jurkat cells expressing an IL-2-luciferace reporter (Promega) with lentivirus to express a chimeric receptor composed of the extracellular domain of human ICOS and the intracellular domain of human CD28, yielding Jurkat/IL-2/ICOS-CD28. APCs were plated in 33 μL/well of assay buffer (RPMI1640 with 5% FBS) at 2×10⁴ cells/well with CTLA-4-Fc or control proteins in 33 μL/well at 300 nM. APCs and proteins were incubated for 20 minutes at room temperature before the addition of effector cells at 2×10⁵ cell/well in 33 μL/well. The plates were transferred to a 37° Celsius incubation chamber, humidified with 5% CO2 for 5 hours, then removed and allowed to acclimate to room temperature for 15 minutes. 100 μL/well of cell lysis and luciferase substrate solution (BioGlo™ luciferase reagent, Promega) was added to each plate and incubated on an orbital shaker for 10 minutes. Relative luminescence values (RLU) were determined for each test sample by measuring luminescence with a 1 second per well integration time using a Cytation 3 imaging reader (BioTek instruments). The percent inhibition mediated by CD86 blockade was determined using the following formula: [(Avg. Control RLU-Experimental RLU)/(Avg. Control RLU)]×100.

[0909] B. Results

[0910] The results are summarized below in Table E4. The values for binding CD80, CD86, and ICOSL (MFI) and percent inhibition CD28 costimulation are provided in addition to the relative ratio, as compared to the corresponding binding and CD86 blockade of the unmodified CTLA-4 polypeptide (ΔWT) for each experiment. As indicated, certain mutations and combinations of mutations were associated with a substantial increase in binding of CTLA-4 ECD to ICOSL, independent of the change in binding to either CD80 or CD86. In some cases, increases in binding to one or both of CD80 or CD86 also were observed.

TABLE E4
Binding and bioactivity of consensus variant CTLA-4-Fc polypeptides

| | SEQ | Binding | | | CD86 |
|---|---|---|---|---|---|
| | ID | CD80 | CD86 | ICOSL | Blockade |
| | NO | MFI | MFI | MFI | Bioassay |
| Mutations | (ECD) | (Δ WT) | (Δ WT) | (Δ WT) | (Δ WT) |
| T53S, M56K, N58S, | 162 | 631192 | 497901 | 215054 | 88.2 |
| L63P, M87V, L98Q, | | (1.2) | (0.9) | (50.9) | (1.3) |
| Y105L | | | | | |
| I18T, A26T, M55T, | 163 | 759480 | 657099 | 89672 | 40.2 |
| M56K, L63P, L98Q, | | (1.4) | (1.1) | (21.2) | (0.6) |
| M99L, Y105L | | | | | |
| I18T, A26T, M56K, | 164 | 496119 | 601631 | 295395 | 86.1 |
| L63P, L98Q, Y105L | | (0.9) | (1.0) | (69.9) | (1.2) |
| T53S, L63P, L98Q | 165 | 564111 | 571155 | 11541 | 86.2 |
| | | (1.1) | (1.0) | (2.7) | (1.2) |
| T53S, L63P, Y105L | 166 | 526605 | 568901 | 20739 | 86.4 |
| | | (1.0) | (1.0) | (4.9) | (1.2) |
| T53S, M56K, N58S, | 168 | 610377 | 604604 | 48034 | 86.7 |
| L63P, M87V, Y105L | | (1.2) | (1.0) | (11.4) | (1.3) |
| L98Q, M99L, Y105L | 59 | 875290 | 686788 | 116699 | 33.9 |
| | | (1.7) | (1.2) | (27.6) | (0.5) |
| E33V, L98Q, Y105L | 174 | 811261 | 580048 | 101877 | 32.5 |
| | | (1.5) | (1.0) | (24.1) | (0.5) |
| E33V, M99L | 177 | 758165 | 618183 | 71903 | 85.2 |
| | | (1.4) | (1.1) | (17.0) | (1.2) |
| T53S, M56K, N58S, | 167 | 347188 | 555921 | 7241 | 82.6 |
| L63P, M87V, L98Q | | (0.7) | (1.0) | (1.7) | (1.2) |
| T53S, M56K, N58S, | 169 | 795550 | 557059 | 248668 | 87.4 |
| L63P, L98Q, Y105L | | (1.5) | (1.0) | (58.8) | (1.3) |
| T53S, M56K, N58S, | 170 | 1133587 | 676071 | 35087 | 88.7 |
| M87V, L98Q, Y105L | | (2.1) | (1.2) | (8.3) | (1.3) |
| T53S, M56K, L63P, | 171 | 736640 | 546545 | 234716 | 90.1 |
| M87V, L98Q, Y105L | | (1.4) | (0.9) | (55.5) | (1.3) |
| T53S, N58S, L63P, | 172 | 637509 | 508878 | 108784 | 86.8 |
| M87V, L98Q, Y105L | | (1.2) | (0.9) | (25.7) | (1.3) |
| M56K, N58S, L63P, | 173 | 688049 | 574298 | 258574 | 85.9 |
| M87V, L98Q, Y105L | | (1.3) | (1.0) | (61.2) | (1.2) |
| E33V, L98Q, M99L, | 176 | 975697 | 628740 | 137713 | 14.1 |
| | | (1.8) | (1.1) | (32.6) | (0.2) |
| Wild-type | 1 | 529140 | 579615 | 4228 | 69.1 |
| | | (1.0) | (1.0) | (1.0) | (1.0) |

### Example 3. Generation and Assay of Select CTLA-4 Variants

[0911] A further panel of CTLA-4 ECD variants was designed with mutations from a variant CTLA-4 identified in the screen described in Example 1, specifically the variant set forth in SEQ ID NO: 113 containing mutations L12F/R16H/G29W/M56T/L98Q/Y105L, which was associated with enhanced binding to CD80, CD86, and ICOSL and suppression of inteferon-gamma. In some cases, S72G was included because it had been identified as a hot spot that had occurred in greater than 35% of the other top 50 hits that were identified as having suppressive activity. For some generated variants, the strategy included removal of some mutations (reversion mutations), for example, to reduce the number of mutations in the variant. Variant CTLA-4 ECDs were generated by site-directed mutagenesis with reference to the wild-type sequence set forth in SEQ ID NO: 1, which was then formatted as an Fc fusion protein as described in Example 1. The variant CTLA-4 ECD-Fc fusions were tested for binding and bioactivity as described in Example 2.

[0912] Table E5 provides the values for binding CD80, CD86, and ICOSL (MFI) and percent inhibition CD28 costimulation in addition to the relative ratio, as compared to the corresponding binding and CD86 blockade of the unmodified CTLA-4 polypeptide (ΔWT) for each experiment.

TABLE E5
Binding and bioactivity of reversion variant CTLA-4-Fc polypeptides

| | | | | | MLR |
|---|---|---|---|---|---|
| | SEQ | Binding | | | CD86 |
| | ID | CD80 | CD86 | ICOSL | Blockade |
| | NO | MFI | MFI | MFI | Bioassay |
| Mutations | (ECD) | (Δ WT) | (Δ WT) | (Δ WT) | (Δ WT) |
| L12F, R16H, | 178 | 76155 | 86548 | 959 (0.8) | 72.3 |
| G29W, M56T, | | (1.5) | (1.2) | | (0.9) |
| L98Q | | | | | |
| L12F, R16H, | 179 | 73996 | 72293 | 1944 (1.7) | 77.8 |
| G29W, M56T, | | (1.4) | (1.0) | | (1.0) |
| Y105L | | | | | |
| L12F, R16H, | 180 | 60527 | 78181 | 862 (0.7) | 89.0 |
| G29W, L98Q, | | (1.2) | (1.1) | | (1.1) |
| Y105L | | | | | |
| L12F, R16H, | 181 | 70120 | 70437 | 1265 (1.1) | 86.8 |
| M56T, L98Q, | | (1.4) | (1.0) | | (1.1) |
| Y105L | | | | | |
| G29W, M56T, | 182 | 70579 | 65251 | 612 (0.5) | 88.6 |
| L98Q, Y105L | | (1.4) | (0.9) | | (1.1) |
| L12F, G29W, | 183 | 66677 | 85018 | 807 (0.7) | 90.0 |
| L98Q, Y105L | | (1.3) | (1.2) | | (1.1) |
| L12F, L98Q, | 184 | 67142 | 85125 | 2584 (2.2) | 86.9 |
| Y105L | | (1.3) | (1.2) | | (1.1) |
| R16H, L98Q, | 185 | 67259 | 70269 | 1018 (0.9) | 89.8 |
| Y105L | | (1.3) | (1.0) | | (1.1) |
| G29W, L98Q, | 186 | 90170 | 64097 | 570 (0.5) | 90.0 |
| Y105L | | (1.8) | (0.9) | | (1.1) |
| M56T, L98Q, | 187 | 68644 | 70222 | 700 (0.6) | 88.0 |
| Y105L | | (1.3) | (1.0) | | (1.1) |
| L12F, R16H, | 188 | 46175 | 58464 | 613 (0.5) | 88.3 |
| G29W, M56T, | | (0.9) | (0.8) | | (1.1) |
| S72G, L98Q, | | | | | |
| Y105L | | | | | |
| G29W, M56T, | 189 | 55706 | 67962 | 534 (0.5) | 88.6 |
| S72G, L98Q, | | (1.1) | (0.9) | | (1.1) |
| Y105L | | | | | |
| Wild-type | 1 | 51269 | 73502 | 1160 (1.0) | 80.5 |
| | | (1.0) | (1.0) | | (1.0) |

### Example 4. Identification of Affinity Modified TACI Extracellular Domain Polypeptide as a B Cell Inhibitory Molecule (BIM)

[0913] This examples describes exemplary TACI polypeptide B cell inhibitory molecules (BIMs) that are employed as part of a provided multi-domain immunomodulatory protein with a T cell inhibitory molecule (TIM), including methods for engineering and identifying affinity-modified (variant) TACI polypeptides that bind (e.g. increased compared to wild-type) to ligands of a B cell stimulatory receptor.

[0914] This Example describes the generation of mutant DNA constructs of human TACI TNFR domains (TD) for translation and expression on the surface of yeast as yeast display libraries, introduction of DNA libraries into yeast, and selection of yeast cells expressing affinity-modified variants of the extracellular domain (ECD) of TACI containing at least one TD (TACI vTD).

A. Generation of Mutant DNA constructs of TACI TNFR Domains

[0915] Libraries containing random substitutions of amino acids were constructed to identify variants of the extracellular domain (ECD) of TACI. Constructs were generated based on a wildtype human TACI sequence containing an ECD portion of TACI that included either (1) both cysteine-rich protein domains (CRD, CRD1/CRD2) as set forth in SEQ ID NO: 516 (corresponding to residues 29-110 as set forth in UniProt Accession No. 014836), or (2) only a single CRD (CRD2) as set forth in SEQ ID NO: 528 (corresponding to residues 68-110 as set forth in UniProt Accession No. 014836).

TACI ECD (29-110) (SEQ ID NO: 516):
VAMRSCPEEQYWDPLLGTCMSCKTICNHQSQRTCA
AFCRSLSCRKEQGKFYDHLLRDCISCASICGQHPK
QCAYFCENKLRS
TACI ECD (68-110) (SEQ ID NO: 528):
SLSCRKEQGKFYDHLLRDCISCASICGQHPKQCAY
FCENKLRS

[0916] DNA encoding the wild-type TACI ECD domain was cloned between the BamHI and KpnI sites of the modified yeast expression vector PBYDS03 (Life Technologies USA) which placed the TACI ECD N-terminal to the yeast surface anchoring domain Sag1 (the C-terminal domain of yeast α-agglutinin) with an in-frame HA fusion tag N-terminal to the TACI ECD sequence and a c-Myc fusion tag C-terminal to the TACI ECD sequence. Expression in this vector is controlled through the inducible GAL1 promoter. After verification of the correct DNA sequence, the wild-type TACI ECD DNA construct was used as template for error-prone PCR to introduce random mutations across the TACI ECD sequence at a frequency of 2-5 mutations per gene copy. The Genemorph II Kit (Agilent, USA) was used in combination with titrating amounts of MnCl2 from 0.0 to 0.6 mM to achieve the desired error rate. After error-prone PCR, the mutagenized DNA was gel purified using the NucleoSpin® Gel and PCR Clean-up kit (Macherey-Nagel, Germany). This isolated DNA fragment was then PCR amplified with OneTaq 2× PCR master mix (New England Biolabs, USA) using primers containing 48 bp overlap regions homologous to pBYDS03 for preparation for large scale yeast electroporation. The TACI ECD DNA insert was gel-purified and resuspended in sterile, deionized water at a nominal concentration of 500 ng/μL.

[0917] To prepare the vector for transformation, pBYDS03 was digested with BamHI-HF and KpnI-HF restriction enzymes (New England Biolabs, USA) and the large vector fragment (expected size: 7671 bp) was gel-purified and dissolved in sterile, deionized water at a nominal concentration of 500 ng/μL. To prepare for yeast transformation, 12 μg of library DNA insert was mixed with 4 μg of linearized vector for each electroporation.

[0918] To introduce random DNA libraries into yeast, the Saccharomyces cerevisiae strain BJ5464 (ATCC.org; ATCC number 208288) was prepared immediately prior to electroporation as detailed in Benatuil, L. et. al., Protein Eng Des Sel. 2010 April; 23(4):155-159. Briefly, an overnight stationary-phase culture of BJ5464 was passaged to OD₆₀₀ 0.3 in 100 mL YPD medium (10 g/L yeast nitrogen base, 20 g/L Peptone and 20 g/L D-(+)-Glucose) and placed in a platform shaker at 30° C. and 300 rpm until the inoculated cultures reached OD₆₀₀ 1.6. After ˜5 hours, cells were harvested by centrifugation and kept on ice for the remainder of the protocol unless otherwise stated. After harvesting, cells were washed twice with 50 mL ice-cold water and once with electroporation buffer (1 M Sorbitol, 1 mM CaCl₂)). Collected cells were conditioned by re-suspending in 20 mL 0.1 M LiAc/10 mM DTT and shaking at 225 rpm in a culture flask for 30 minutes at 30° C. Conditioned cells were immediately centrifuged, washed twice with electroporation buffer, and resuspended with ˜100-200 μl of electroporation buffer to bring the volume to 1 mL. This conditioned cell suspension was sufficient for two electroporation reactions in 400 μl cuvettes.

[0919] For each electroporation, 12 μg of library DNA insert and 4 μg of linearized pBYDS03 vector (described above) was mixed with 400 μl of electrocompetent BJ5464 and transferred to a pre-chilled BioRad GenePulser cuvette with 2 mm electrode gap. The mixtures were kept on ice for 5 minutes, prior to electroporation using a BTX ECM399 exponential decay wave electroporation system at 2500V. Immediately following electroporation, cells were added to 8 mL of 1:1 mixture of 1 M Sorbitol:1X YPD, and left at room temperature without shaking for 10 min, then placed on platform shaker for 1 hr at 225 rpm and 30° C. Cells were collected by centrifugation and resuspended in 250 mL SCD-Leu medium to accommodate the LEU2 selective marker carried by modified plasmid pBYDS03. One liter of SCD-Leu media was generated with 14.7 gm sodium citrate, 4.29 gm citric acid monohydrate, 20 gm dextrose, 6.7 gm yeast nitrogen base, and 1.6 gm yeast synthetic drop-out media supplement without leucine. The medium was filter sterilized before use using a 0.22 m vacuum filter device. Library size was estimated by spotting serial dilutions of freshly recovered cells on an SCD-Leu agar plate in the dilution range of 10⁻⁵ to 10⁻¹⁰ and extrapolating by counting colonies after three days. The remainder of the electroporated culture was grown to saturation and cells from this culture were subcultured 1/100 into the same medium once more and grown to saturation to minimize the fraction of untransformed cells and to allow for segregation of plasmid from cells that may contain two or more library variants. To maintain library diversity, this subculturing step was carried out using an inoculum that contained at least 10× more cells than the calculated library size. Cells from the second saturated culture were resuspended in fresh medium containing sterile 25% (weight/volume) glycerol to a density of 1×10¹⁰/mL and frozen and stored at −80° C. (frozen library stock).

[0920] A number of cells equal to at least 10 times the estimated library size were thawed from individual library stocks, suspended to 0.5×10⁷ cells/mL in non-inducing SCD-Leu medium, and grown overnight. The next day, a number of cells equal to 10 times the library size were centrifuged at 2000 RPM for two minutes and resuspended to 0.5×10⁷ cells/mL in inducing SCDG-Leu media. One liter of SCDG-Leu induction media was generated with 5.4 gm Na₂HPO₄, 8.56 gm NaH₂PO₄·H₂O, 20 gm galactose, 2.0 gm dextrose, 6.7 gm yeast nitrogen base, and 1.6 gm yeast synthetic drop out media supplement without leucine dissolved in water and sterilized through a 0.22 μm membrane filter device. The culture was grown in induction medium overnight at 30° C. to induce expression of library proteins on the yeast cell surface.

[0921] Following overnight induction of the TACI ECD libraries, a number of cells equivalent to 10 times the estimated library diversity were sorted by magnetic separation using Dynabeads™ His-Tag magnetic beads preloaded with BAFF-9×His to enrich for TACI ECD variants with the ability to bind their exogenous recombinant counter-structure proteins. The outputs from the magnetic separation were used in a subsequent FACS selection scheme involving four rounds of positive selections alternating between BAFF-9×His and APRIL-FLAG, with simultaneous 10-fold reduction in counter structure concentration each round (e.g., FACS1: 50 nM APRIL-FLAG; FACS4: 0.05 nM BAFF-9×His). The incubation volume was adjusted to maintain at least a 10-fold stoichiometric excess of counter structure over the total number of yeast-displayed TACI ECD variant molecules (assuming 100,000 copies of protein per cell) to avoid ligand depletion artifacts which can reduce library discrimination. Binding of BAFF-9×His and APRIL-FLAG to TACI ECD variants was detected with PE conjugated anti-6×His tag antibody (BioLegend, USA) and PE conjugated anti-FLAG-tag antibody, respectively. Variants from FACS3 and FACS4 outputs were isolated for DNA sequencing and subsequent cloning for recombinant Fc fusion expression.

[0922] A second cycle of random mutagenesis was carried out on yeast cell outputs from the FACS4 BAFF-9×His selections described above. The positive selection protocol with alternating counter structures per sort was the same as the first cycle except that the order of counter structures was switched (e.g., FACS1: 50 nM BAFF-9×His; FACS4: 0.05 nM APRIL-FLAG). Additional variants were chosen from FACS3 and FACS4 yeast cell outputs.

[0923] TACI ECD variant inserts from FACS3 and FACS4 outputs from both cycle 1 and cycle 2 selections, as described above, were subcloned into an Fc fusion vector for sequence analysis of individual clones.

[0924] Output cell pools from selected TACI ECD FACS sorts were grown to terminal density in SCD-Leu selection medium and plasmid DNA was isolated using a yeast plasmid DNA isolation kit (Zymoresearch, USA). For generation of Fc fusions, the affinity matured TACI ECD variants were PCR amplified with primers containing 40 bp homologous regions on either end with an AfeI and BamHI digested Fc fusion vector encoding and in-frame with the Fc region to carry out in vitro recombination using Gibson Assembly Master Mix (New England Biolabs). The Gibson Assembly reaction was added to the E. coli strain NEB5alpha (New England Biolabs, USA) for heat shock transformation following the manufacturer's instructions.

[0925] Dilutions of transformation reactions were plated onto LB-agar containing 100 μg/mL carbenicillin (Teknova, USA) to isolate single colonies for selection. Generally, up to 96 colonies from each transformation were then grown in 96 well plates to saturation overnight at 37° C. in LB-broth containing 100 μg/mL carbenicillin (Teknova cat #L8112) and a small aliquot from each well was submitted for DNA sequencing to identify mutation(s) in all clones.

[0926] After sequence analysis and identification of clones of interest, plasmid DNA was prepared using the MidiPlus kit (Qiagen).

[0927] Recombinant variant Fc fusion proteins were produced from suspension-adapted human embryonic kidney (HEK) 293 cells using the Expi293 expression system (Invitrogen, USA). Supernatant was harvested and the Fc protein was captured on Mab SelectSure (GE Healthcare cat. no. 17543801). Protein was eluted from the column using 50 mM Acetate pH3.6. The MabSelect Sure eluate was pooled and the pH was adjusted to above pH5.0. This material was then polished on a Preparative SEC column, to generate highly purified monomeric material. This material was buffer exchanged into 10 mM Acetate, 9% Sucrose pH 5.0. The protein purity was assessed by analytic SEC. Material was vialed and stored at −80.

[0928] Amino acid substitutions in selected TACI vTDs that were identified and generated by the selection are set forth in Table 2. Selected vTDs were tested for binding and functional activity as described in Example 6.

### Example 5. Identification of Affinity Modified BCMA Extracellular Domain Polypeptide and Immunomodulatory Proteins

[0929] This examples describes exemplary BCMA polypeptide B cell inhibitory molecules (BIMs) that are employed as part of a provided multi-domain immunomodulatory protein with a T cell inhibitory molecule (TIM), including methods for engineering and identifying affinity-modified (variant) BCMA polypeptides that bind (e.g. increased compared to wild-type) to ligands of a B cell stimulatory receptor. The variant BCMA extracellular polypeptides also were formatted as an immunomodulatory protein as a BCMA Fc-fusion protein without a T cell inhibitory molecule.

[0930] This Example describes the generation of mutant DNA constructs of human BCMA TNFR domains (TD) for translation and expression on the surface of yeast as yeast display libraries, introduction of DNA libraries into yeast, and selection of yeast cells expressing affinity-modified variants of the extracellular domain (ECD) of BCMA containing at least one TD (BCMA vTD). The selected BCMA vTD were then formatted as Fc fusion proteins

[0931] A. Generation of Mutant DNA constructs of BCMA Domains

[0932] Libraries containing random substitutions of amino acids were constructed to identify variants of the extracellular domain (ECD) of BCMA. Constructs were generated based on a wildtype human BCMA sequence containing an ECD portion of BCMA that included the cysteine-rich protein domain (CRD) as set forth in SEQ ID NO: 356 (corresponding to residues 2-54 as set forth in UniProt Accession No. Q02223 designated “BCMA ECD (2-54)” as follows:

BCMA ECD (2-54) (SEQ ID NO: 356):
LQMAGQCSQNEYFDSLLHACIPCQLRCSSNTPPLT
CQRYCNASVTNSVKGTNA

[0933] DNA encoding the wild-type BCMA ECD domain was cloned between the BamHI and KpnI sites of the modified yeast expression vector PBYDS03 (Life Technologies USA) which placed the BCMA ECD N-terminal to the yeast surface anchoring domain Sag1 (the C-terminal domain of yeast α-agglutinin) with an in-frame HA fusion tag N-terminal to the BCMA ECD sequence and a c-Myc fusion tag C-terminal to the BCMA ECD sequence. Expression in this vector is controlled through the inducible GAL1 promoter. After verification of the correct DNA sequence, the wild-type BCMA ECD DNA construct was used as template for error-prone PCR to introduce random mutations across the BCMA ECD sequence at a frequency of 2-5 mutations per gene copy. The Genemorph II Kit (Agilent, USA) was used in combination with titrating amounts of MnCl2 from 0.0 to 0.6 mM to achieve the desired error rate. After error-prone PCR, the mutagenized DNA was gel purified using the NucleoSpin® Gel and PCR Clean-up kit (Macherey-Nagel, Germany). This isolated DNA fragment was then PCR amplified with OneTaq 2× PCR master mix (New England Biolabs, USA) using primers containing 48 bp overlap regions homologous to pBYDS03 for preparation for large scale yeast electroporation. The BCMA ECD DNA insert was gel-purified and resuspended in sterile, deionized water at a nominal concentration of 500 ng/μL.

[0934] To prepare the vector for transformation, pBYDS03 was digested with BamHI-HF and KpnI-HF restriction enzymes (New England Biolabs, USA) and the large vector fragment (expected size: 7671 bp) was gel-purified and dissolved in sterile, deionized water at a nominal concentration of 500 ng/μL. To prepare for yeast transformation, 12 μg of library DNA insert was mixed with 4 μg of linearized vector for each electroporation.

[0935] To introduce random DNA libraries into yeast, the Saccharomyces cerevisiae strain BJ5464 (ATCC.org; ATCC number 208288) was prepared immediately prior to electroporation as detailed in Benatuil, L. et. al., Protein Eng Des Sel. 2010 April; 23(4):155-159. Briefly, an overnight stationary-phase culture of BJ5464 was passaged to OD600 0.3 in 100 mL YPD medium (10 g/L yeast nitrogen base, 20 g/L Peptone and 20 g/L D-(+)-Glucose) and placed in a platform shaker at 30° C. and 300 rpm until the inoculated cultures reached OD600 1.6. After ˜5 hours, cells were harvested by centrifugation and kept on ice for the remainder of the protocol unless otherwise stated. After harvesting, cells were washed twice with 50 mL ice-cold water and once with electroporation buffer (1 M Sorbitol, 1 mM CaCl₂)). Collected cells were conditioned by re-suspending in 20 mL 0.1 M LiAc/10 mM DTT and shaking at 225 rpm in a culture flask for 30 minutes at 30° C. Conditioned cells were immediately centrifuged, washed twice with electroporation buffer, and resuspended with ˜100-200 μl of electroporation buffer to bring the volume to 1 mL. This conditioned cell suspension was sufficient for two electroporation reactions in 400 μl cuvettes.

[0936] For each electroporation, 12 μg of library DNA insert and 4 μg of linearized pBYDS03 vector (described above) was mixed with 400 μl of electrocompetent BJ5464 and transferred to a pre-chilled BioRad GenePulser cuvette with 2 mm electrode gap. The mixtures were kept on ice for 5 minutes, prior to electroporation using a BTX ECM399 exponential decay wave electroporation system at 2500V. Immediately following electroporation, cells were added to 8 mL of 1:1 mixture of 1 M Sorbitol:1X YPD, and left at room temperature without shaking for 10 min, then placed on platform shaker for 1 hr at 225 rpm and 30° C. Cells were collected by centrifugation and resuspended in 250 mL SCD-Leu medium to accommodate the LEU2 selective marker carried by modified plasmid pBYDS03. One liter of SCD-Leu media was generated with 14.7 gm sodium citrate, 4.29 gm citric acid monohydrate, 20 gm dextrose, 6.7 gm yeast nitrogen base, and 1.6 gm yeast synthetic drop-out media supplement without leucine. The medium was filter sterilized before use using a 0.22 m vacuum filter device. Library size was estimated by spotting serial dilutions of freshly recovered cells on an SCD-Leu agar plate in the dilution range of 10-5 to 10-10 and extrapolating by counting colonies after three days. The remainder of the electroporated culture was grown to saturation and cells from this culture were subcultured 1/100 into the same medium once more and grown to saturation to minimize the fraction of untransformed cells and to allow for segregation of plasmid from cells that may contain two or more library variants. To maintain library diversity, this subculturing step was carried out using an inoculum that contained at least 10× more cells than the calculated library size. Cells from the second saturated culture were resuspended in fresh medium containing sterile 25% (weight/volume) glycerol to a density of 1×10¹⁰/mL and frozen and stored at −80° C. (frozen library stock).

[0937] A number of cells equal to at least 10 times the estimated library size were thawed from individual library stocks, suspended to 0.5×10⁷ cells/mL in non-inducing SCD-Leu medium, and grown overnight. The next day, a number of cells equal to 10 times the library size were centrifuged at 2000 RPM for two minutes and resuspended to 0.5×10⁷ cells/mL in inducing SCDG-Leu media. One liter of SCDG-Leu induction was generated with 5.4 gm Na2HPO4, 8.56 gm NaH2PO4·H20, 20 gm galactose, 2.0 gm dextrose, 6.7 gm yeast nitrogen base, and 1.6 gm yeast synthetic drop out media supplement without leucine dissolved in water and sterilized through a 0.22 μm membrane filter device. The culture was grown in induction medium overnight at 30° C. to induce expression of library proteins on the yeast cell surface.

[0938] Following overnight induction of the naïve BCMA ECD libraries, a number of cells equivalent to 10 times the estimated library diversity were sorted by magnetic separation using Dynabeads™ His-Tag magnetic beads preloaded with BAFF-9×His to enrich for BCMA ECD variants with the ability to bind their exogenous recombinant counter-structure proteins. The outputs from the magnetic separation were used in a subsequent FACS selection scheme involving four rounds of positive selections alternating between BAFF-9×His and APRIL-FLAG, with simultaneous 10-fold reduction in counter structure concentration each round (e.g., FACS1: 50 nM APRIL-FLAG; FACS4: 0.05 nM BAFF-9×His). The incubation volume was adjusted to maintain at least a 10-fold stoichiometric excess of counter structure over the total number of yeast-displayed BCMA ECD variant molecules (assuming 100,000 copies of protein per cell) to avoid ligand depletion artifacts which can reduce library discrimination. Binding of BAFF-9×His and APRIL-FLAG to BCMA ECD variants was detected with PE conjugated anti-6×His tag antibody (BioLegend, USA) and PE conjugated anti-FLAG-tag antibody, respectively. Variants from FACS3 and FACS4 outputs were isolated for DNA sequencing and subsequent cloning for recombinant Fc fusion expression.

[0939] A second cycle of random mutagenesis was carried out on yeast cell outputs from the FACS4 BAFF-9×His selections described above. The positive selection protocol with alternating counter structures per sort was the same as the first cycle except that the order of counter structures was switched (e.g., FACS1: 50 nM BAFF-9×His; FACS4: 0.05 nM APRIL-FLAG). Additional variants were chosen from FACS3 and FACS4 yeast cell outputs.

[0940] A. Generation of Degenerate Codon Mutant DNA Constructs of BCMA TNFR Domains

[0941] This Example describes the design of targeted degenerate codon DNA libraries of human BCMA TNFR domains for translation and expression on the surface of yeast as yeast display libraries, introduction of DNA libraries into yeast, and selection of yeast cells expressing affinity-modified variants of BCMA TNFR.

[0942] Targeted DNA oligonucleotide libraries were constructed based on available crystal structure and functional data following in vitro characterization of the recombinant BCMA ECD variant Fc fusion proteins isolated from cycle 1 and cycle 2 random library affinity maturation selections. First, BCMA positions for targeted mutagenesis were restricted to BCMA:BAFF interfacial contacts (PDB ID: 1XU2), using a per-residue weighted average distance cutoff of 4.5 Angstroms (PyMOL, Schrödinger). Second, sequence-function heat maps were generated using available IC₅₀ data to identify positions where mutation generally improved binding to BAFF and APRIL. To aid visual inspection, a position-specific propensity score (PSPS) was calculated by comparing the frequency of all mutations in recombinant BCMA ECD variant Fc fusions having an IC₅₀ within the top 10% relative to whole-population mutational frequency. The PSPS was further scaled by the frequency of mutation within the top 10% (i.e., numerator term of PSPS) to help correct for biasing of positions with high mutational load. The average IC₅₀ for cycle 2 outputs was one order of magnitude lower for BAFF than APRIL, and thus, preference was given to positions where substitution generally improved BAFF binding.

[0943] Finally, consideration of recombinant BCMA ECD variant Fc protein expression yields and homogeneity evaluated from Protein A affinity chromatography and size exclusion chromatography, respectively. Taken together, seven positions were selected for design of three independent degenerate codon BCMA ECD libraries: H19, 122, Q25, S30, N31, L35, and T36. Site saturation mutagenesis at each of the desired positions indicated in Table E6 was carried out using the mixed base set “NNK”, which encodes all 20 proteinogenic amino acids. Each degenerate codon library was designed using SnapGene (GSL Biotech LLC, USA) and synthesized as a single-stranded, full-length DNA oligonucleotide Ultramer® from Integrated DNA Technologies.

TABLE E6
Targeted library positions selected for saturation mutagenesis “NKK”

| Position | 19 | 22 | 25 | 30 | 31 | 35 | 36 |
|---|---|---|---|---|---|---|---|
| Wt | H | I | Q | S | N | L | T |
| residue | | | | | | | |
| Design 1 | X | X | | X | X | X | |
| Design 2 | X | | X | | X | X | X |
| Design 3 | X | X | X | X | X | X | X |

[0944] Targeted NNK ssDNA Ultramers® were prepared and introduced into yeast essentially as described in Example 4. The libraries were used to select yeast expressing affinity modified variants of BCMA ECD substantially as described in Example 4. Selections were performed essentially as described in Example 4 following the cycle 1 random library selection protocol. Additional variants identified in the screen as described are set forth in Table E14.

[0945] B. Reformatting Selection Outputs as Fc-Fusions

[0946] BCMA ECD variant outputs from the selections, as described above, were subcloned into an Fc fusion vector for sequence analysis of individual clones To generate recombinant immunomodulatory proteins as Fc fusion proteins containing an ECD of BCMA with at least one affinity-modified domain (e.g., variant BCMA ECD-Fc), the encoding DNA was generated to encode a protein as follows: variant BCMA domain followed by a linker of 7 amino acids (GSGGGGS; SEQ ID NO: 590) followed by a human IgG1 effectorless Fc sequence containing the mutations L234A, L235E and G237A, by the Eu Index numbering system for immunoglobulin proteins. Since the construct does not include any antibody light chains that can form a covalent bond with a cysteine, the human IgG1 Fc also contained replacement of the cysteine residues to a serine residue at position 220 (C220S) by Eu Index numbering system for immunoglobulin proteins (corresponding to position 5 (C5S) with reference to the wild-type or unmodified Fc set forth in SEQ ID NO: 586). The Fc region also lacked the C-terminal lysine at position 447 (designated K447del) normally encoded in the wild type human IgG1 constant region gene (corresponding to position 232 of the wild-type or unmodified Fc set forth in SEQ ID NO: 586). The effectorless (inert) IgG1 Fc in the fusion constructs is set forth in SEQ ID NO:589:

[0947] Output cell pools from selected BCMA ECD FACS sorts were grown to terminal density in SCD-Leu selection medium and plasmid DNA was isolated using a yeast plasmid DNA isolation kit (Zymoresearch, USA). For generation of Fc fusions, the affinity matured BCMA ECD variants were PCR amplified with primers containing 40 bp homologous regions on either end with an AfeI and BamHI digested Fc fusion vector encoding and in-frame with the Fc region to carry out in vitro recombination using Gibson Assembly Master Mix (New England Biolabs). The Gibson Assembly reaction was added to the E. coli strain NEB5alpha (New England Biolabs, USA) for heat shock transformation following the manufacturer's instructions.

[0948] Dilutions of transformation reactions were plated onto LB-agar containing 100 μg/mL carbenicillin (Teknova, USA) to isolate single colonies for selection. Generally, up to 96 colonies from each transformation were then grown in 96 well plates to saturation overnight at 37° C. in LB-broth containing 100 μg/mL carbenicillin (Teknova cat #L8112) and a small aliquot from each well was submitted for DNA sequencing to identify mutation(s) in all clones.

[0949] After sequence analysis and identification of clones of interest, plasmid DNA was prepared using the MidiPlus kit (Qiagen).

[0950] Recombinant variant Fc fusion proteins were produced from suspension-adapted human embryonic kidney (HEK) 293 cells using the Expi293 expression system (Invitrogen, USA). Supernatant was harvested and the Fc Protein was captured on Mab SelectSure (GE Healthcare cat. no. 17543801). Protein was eluted from the column using 50 mM Acetate pH3.6. The MabSelect Sure eluate was pooled and the pH was adjusted to above pH5.0. This material was then polished on a Preparative SEC column, to generate highly purified monomeric material. This material was buffer exchanged into 10 mM Acetate, 9% Sucrose pH 5.0. The protein purity was assessed by analytic SEC. Material is vialed and stored at −80.

[0951] Amino acid substitutions in selected BCMA vTDs that were identified by the selection are set forth in Table 1. Selected BCMA vTDs formatted as Fc fusion proteins, were tested for binding and functional activity as described in Example 6.

### Example 6. Assessment of Activity of Fc Fusion Proteins

[0952] This Example describes characterization of the activity of BCMA domain-containing molecules, such as soluble wild-type (WT) or variant BCMA vTDs formatted as Fc fusions, using a cell line-based in vitro bioassay.

[0953] Jurkat cells with a nuclear factor kappa-light-chain-enhancer of activated B cells (NF-κB) luciferase-based reporter were purchased (BPS Bioscience). Jurkat/NK-κB cells were transduced with lentivirus to yield stable, cell surface expression of mouse TACI (Jurkat/NF-κB/TACI). Cells expressing mouse TACI respond to both human and mouse APRIL or BAFF. Following binding of recombinant human or mouse APRIL or BAFF to TACI, endogenous NK-κB transcription factors in the Jurkat cells bind to the DNA response elements controlling transcription of a firefly luciferase gene. Luciferase production was quantitated through the addition of a luciferin-containing substrate which, when oxidized, generates light that can be measured using a microplate reader. A schematic of the Jurkat/NF-κB/TACI assay is shown in FIG. 1.

[0954] Recombinant human and mouse APRIL and BAFF ligands were purchased: human APRIL (Tonbo Biosciences); human BAFF (BioLegend); mouse APRIL (ProSci Incorporated); and mouse BAFF (R & D Systems).

[0955] To determine bioactivity of BCMA WT or vTD domain-containing molecules, recombinant human or mouse APRIL or BAFF at varying concentrations (ranging 1-10 nM) in 30 μL were incubated with fixed or titrated (ranging 40 nM-66 pM) BCMA domain-containing molecules in 30 μL. Ligands and soluble receptors were incubated for 20 minutes with shaking at room temperature (RT). Fifty μL was transferred to a 96-well, white flat-bottomed plated containing 1.5×10⁵ Jurkat/NF-κB/TACI cells/well in 50 μL media (RPMI1640+5% fetal bovine serum [FBS]). Wells were mixed and plates incubated for 5 hours at 37° Celsius (C) in a humidified 5% CO₂ incubation chamber. Plates were removed from the incubator and 100 μL of cell lysis and luciferase substrate solution (Bio-Glo™ Luciferase Assay System, Promega) was added to each well and the plates were incubated on an orbital shaker for 10 minutes. Relative luminescence values (RLU) were determined for each test sample by measuring luminescence with a 1 second per well integration time using a Cytation 3 (BioTek Instruments) imaging reader. Decreased RLU in the presence of BCMA WT or vTDs relative to control proteins represent blockade and inhibition of ligand signaling via the transduced TACI receptor in the Jurkat/NF-κB/TACI cells.

[0956] As shown in FIG. 2, exemplary BCMA-Fc vTDs, inhibit ligand signaling at levels equal to or greater than Fc fusion proteins containing WT BCMA domains.

### Example 7. Generation of Multi-Domain T and B Cell Inhibitory Immunomodulatory Proteins

[0957] Multi-domain immunomodulatory proteins were generated containing (1) at least one T cell inhibitory molecule (TIM) that binds to a T cell stimulatory receptor, such as CD28, or a ligand thereof; and (2) at least one B cell inhibitory molecule (BIM) that binds to a B cell stimulatory receptor, such as BCMA or APRIL, or a ligand thereof. Exemplary TIMs included a wild-type (WT) or variant CTLA-4 ECD containing an IgSF domain (CTLA-4 IgD or vIgD, respectively) that binds to CD28, e.g. such as any as described in Example 1. Exemplary BIMs included (i) a wild-type (WT) or variant TACI ECD containing a TD domain (TACI TD or vTD, respectively) that binds to ligands APRIL or BAFF, such as described in Example 5; or (ii) a WT or variant BCMA ECD containing a TD domain (BCMA TD or vTD, respectively) that binds to ligands APRIL or BAFF, such as described in Example 6.

[0958] The immunomodulatory proteins were generated as either multimeric molecules via fusion with an Fc protein or as monomeric molecules.

[0959] A. Multimeric Configurations

[0960] Various multi-domain immunomodulatory proteins were generated as multimeric molecules via fusion with an Fc protein in various configurations as summarized below. The TIM or BIM of the multi-domain immunomodulatory protein were variously linked to the N- or C-terminus of an Fc region via a peptide linker, such as a GSGGGGS (SEQ ID NO: 590), GGGGSGGGGS (2×GGGGS; SEQ ID NO: 594), (GGGGS)₄ (SEQ ID NO:600), or (GGGGS)₅ (SEQ ID NO:671).

[0961] To generate homodimeric Fc fusions, an exemplary IgG1 Fc region used in generated constructs had the sequence set forth in SEQ ID NO:589 and contained the mutation C220S by EU numbering, the mutations L234A, L235E, and G237A, by EU numbering, to reduce effector function (the mutations corresponded to C5S, L19A, L20E, G22A, with reference to wild-type human IgG1 Fc set forth in SEQ ID NO:586). and removal ofthe C-terminal lysine, K447del by EU numbering (corresponding to deletion of position 232, with reference to wild-type or unmodified Fc set forth in SEQ ID NO: 586).

[0962] Table E7-A below sets forth exemplary generated multi-domain homodimeric immunomodulatory Fc fusion proteins.

TABLE E7-A
Multi-Domain Immunomodulatory Proteins (Homodimer)

| | DNA | Protein SEQ | | | | | | |
|---|---|---|---|---|---|---|---|---|
| | SEQ | ID NO | | CTLA-4 | TACI | BCMA | Linker | Fc |
| | ID | −His | +His | (SEQ ID | (SEQ ID | (SEQ ID | (SEQ ID | (SEQ ID |
| Description | NO | tag | tag | NO) | NO) | NO) | NO) | NO) |

CTLA-4 ECD and BCMA

| | | | | | |
|---|---|---|---|---|---|
| CTLA-4 186- | 601 | G29W/L98Q/ | H19L (2- | GSG4S | Fc (589) |
| GSG4S-Fc- | | Y105L | 54) | (590) | |
| (G4S)4 - | | ECD | (406) | (G4S)4 | |
| BCMA 406 | | (186) | | (600) | |
| CTLA-4 WT | 602 | CTLA-4 | H19L (2- | GSG4S | Fc (589) |
| ECD 1 GSG4S | | ECD | 54) | (590) | |
| Fc (G4S)4 | | (1) | (406) | (G4S)4 | |
| BCMA 406 | | | | (600) | |
| CTLA-4 | 603 | G29W/L98Q/ | S16A, | GSG4S | Fc (589) |
| 186GSG4S- | | Y105L | H19Y, | (590) | |
| Fc-(G4S)4- | | ECD | R39Q (2- | (G4S)4 | |
| BCMA 381 | | (186) | 54) | (600) | |
| | | | (381) | | |
| CTLA-4 | 604 | G29W/L98Q/ | H19R (2- | GSG4S | Fc (589) |
| 186GSG4S- | | Y105L | 54) | (590) | |
| Fc-(G4S)4- | | ECD | (411) | (G4S)4 | |
| BCMA 411 | | (186) | | (600) | |
| CTLA-4 | 605 | G29W/L98Q/ | H19K (2- | GSG4S | Fc (589) |
| 186GSG4S- | | Y105L | 54) | (590) | |
| Fc-(G4S)4 - | | ECD | (405) | (G4S)4 | |
| BCMA 405 | | (186) | | (600) | |
| CTLA-4 WT | 606 | CTLA-4 | S16A, | GSG4S | Fc (589) |
| ECD 1 GSG4S | | ECD | H19Y, | (590) | |
| Fc (G4S)4 | | (1) | R39Q (2- | (G4S)4 | |
| BCMA 381 | | | 54) | (600) | |
| | | | (381) | | |
| CTLA-4 WT | 607 | CTLA-4 | H19R (2- | GSG4S | Fc (589) |
| ECD 1 GSG4S | | ECD | 54) | (590) | |
| Fc (G4S)4 | | (1) | (4H) | (G4S)4 | |
| BCMA 411 | | | | (600) | |
| CTLA-4 WT | 608 | CTLA-4 | H19K (2- | GSG4S | Fc (589) |
| ECD 1 GSG4S | | ECD | 54) | (590) | |
| Fc (G4S)4 | | (1) | (405) | (G4S)4 | |
| BCMA 405 | | | | (600) | |
| BCMA 381 | 609 | G29W/L98Q/ | S16A, | GSG4S | Fc (589) |
| GSG4S-Fc- | | Y105L | H19Y, | (590) | |
| (G4S)4-CTLA- | | ECD | R39Q (2- | (G4S)4 | |
| 4 186 | | (186) | 54) | (600) | |
| | | | (381) | | |
| CTLA-4 WT | 631 | CTLA-4 | 2-54 WT | GSG4S | Fc (589) |
| ECD 1 GSG4S | | ECD | (356) | (590) | |
| Fc (G4S)2 | | (1) | | (G4S)2 | |
| BCMA 356 | | | | (594) | |
| CTLA-4 92 | 632 | G29W/N58S/ | 2-54 WT | GSG4S | Fc (589) |
| GSG4S Fc | | L63P/ | (356) | (590) | |
| (G4S)2 BCMA | | Q82R/L98Q/ | | (G4S)2 | |
| 356 | | Y105L | | (594) | |
| | | ECD | | | |
| | | (92) | | | |
| CTLA-4 165 | 633 | T53S/L63P/ | 2-54 WT | GSG4S | Fc (589) |
| GSG4S Fc | | L98Q | (356) | (590) | |
| (G4S)2 BCMA | | ECD | | (G4S)2 | |
| 356 | | (165) | | (594) | |
| CTLA-4 WT | 634 | CTLA-4 | H19Y (2- | GSG4S | Fc (589) |
| ECD 1 GSG4S | | ECD | 54) | (590) | |
| Fc (G4S)2 | | (1) | (357) | (G4S)2 | |
| BCMA 357 | | | | (594) | |
| CTLA-4 92 | 635 | G29W/N58S/ | H19Y (2- | GSG4S | Fc (589) |
| GSG4S Fc | | L63P/ | 54) | (590) | |
| (G4S)2 BCMA | | Q82R/L98Q/ | (357) | (G4S)2 | |
| 357 | | Y105L | | (594) | |
| | | ECD | | | |
| | | (92) | | | |
| CTLA-4 165 | 636 | T53S/L63P/ | H19Y (2- | GSG4S | Fc (589) |
| GSG4S Fc | | L98Q | 54) | (590) | |
| (G4S)2 BCMA | | ECD | (357) | (G4S)2 | |
| 357 | | (165) | | (594) | |
| BCMA 411 | 645 | G29W/L98Q/ | H19R (2- | GSG4S | Fc (589) |
| GSG4S Fc | | Y105L | 54) | (590) | |
| (G4S)4 CTLA-4 | | ECD | (4H) | (G4S)4 | |
| 186 | | (186) | | (600) | |
| BCMA 405 | 646 | G29W/L98Q/ | H19K (2- | GSG4S | Fc (589) |
| GSG4S Fc | | Y105L | 54) | (590) | |
| (G4S)4 CTLA-4 | | ECD | (405) | (G4S)4 | |
| 186 | | (186) | | (600) | |
| BCMA 406 | 647 | G29W/L98Q/ | H19L (2- | GSG4S | Fc (589) |
| GSG4S Fc | | Y105L | 54) | (590) | |
| (G4S)4 CTLA-4 | | ECD | (406) | (G4S)4 | |
| 186 | | (186) | | (600) | |
| BCMA 381 | 649 | CTLA-4 | S16A, | GSG4S | Fc (589) |
| GSG4S Fc | | ECD | H19Y, | (590) | |
| (G4S)4 CTLA-4 | | (1) | R39Q (2- | (G4S)4 | |
| WT ECD 1 | | | 54) | (600) | |
| | | | (381) | | |
| BCMA 411 | 650 | CTLA-4 | H19R (2- | GSG4S | Fc (589) |
| GSG4S Fc | | ECD | 54) | (590) | |
| (G4S)4 CTLA-4 | | (1) | (4H) | (G4S)4 | |
| WT ECD 1 | | | | (600) | |
| BCMA 405 | 651 | CTLA-4 | H19K (2- | GSG4S | Fc (589) |
| GSG4S Fc | | ECD | 54) | (590) | |
| (G4S)4 CTLA-4 | | (1) | (405) | (G4S)4 | |
| WT ECD 1 | | | | (600) | |
| BCMA 406 | 652 | CTLA-4 | H19L (2- | GSG4S | Fc (589) |
| GSG4S Fc | | ECD | 54) | (590) | |
| (G4S)4 CTLA-4 | | (1) | (406) | (G4S)4 | |
| WT ECD 1 | | | | (600) | |
| BCMA 357 | 655 | G29W/N58S/ | H19Y (2- | (G4S)3 | Fc (589) |
| (G4S)3 CTLA-4 | | L63P/ | 54) | (595) | |
| 92 GSG4S Fc | | Q82R/L98Q/ | (357) | GSG4S | |
| | | Y105L | | (590) | |
| | | ECD | | | |
| | | (92) | | | |
| BCMA 357 | 656 | G29W/N58S/ | H19Y (2- | (G4S)3 | Fc (589) |
| GSG4S Fc | | L63P/ | 54) | (595) | |
| (G4S)3 CTLA-4 | | Q82R/L98Q/ | (357) | GSG4S | |
| 92 | | Y105L | | (590) | |
| | | ECD | | | |
| | | (92) | | | |
| CTLA-4 92 | 657 | G29W/N58S/ | H19Y (2- | (G4S)4 | Fc (589) |
| (G4S)4 BCMA | | L63P/ | 54) | (600) | |
| 357 GSG4S Fc | | Q82R/L98Q/ | (357) | GSG4S | |
| | | Y105L | | (590) | |
| | | ECD | | | |
| | | (92) | | | |
| CTLA-4 92 | 658 | G29W/N58S/ | H19Y (2- | GSG4S | Fc (589) |
| GSG4S Fc | | L63P/ | 54) | (590) | |
| (G4S)3 BCMA | | Q82R/L98Q/ | (357) | (G4S)3 | |
| 357 | | Y105L | | (595) | |
| | | ECD | | | |
| | | (92) | | | |
| CTLA-4 92 | 659 | G29W/N58S/ | H19Y (2- | GSG4S | Fc (589) |
| GSG4S Fc | | L63P/ | 54) | (590) | |
| (G4S)5 BCMA | | Q82R/L98Q/ | (357) | (G4S)5 | |
| 357 | | Y105L | | (671) | |
| | | ECD | | | |
| | | (92) | | | |

CTLA-4 ECD and TACI

| | | | | | |
|---|---|---|---|---|---|
| CTLA-4 186 | 610 | G29W/L98Q/ | K77E, | GSG4S | Fc (589) |
| GSG4S Fc | | Y105L | F78Y, | (590) | |
| (G4S)4 TACI | | ECD | Y102D | (G4S)4 | |
| 541 | | (186) | (68-110) | (600) | |
| | | | (541) | | |
| CTLA-4 WT | 611 | CTLA-4 | K77E, | GSG4S | Fc (589) |
| ECD 1 GSG4S | | ECD | F78Y, | (590) | |
| Fc (G4S)4 TACI | | (1) | Y102D | (G4S)4 | |
| 541 | | | (68-110) | (600) | |
| | | | (541) | | |
| CTLA-4 186 | 612 | G29W/L98Q/ | Q75E, | GSG4S | Fc (589) |
| GSG4S Fc | | Y105L | R84Q | (590) | |
| (G4S)4 (TACI | | ECD | (68-110) | (G4S)4 | |
| 542) | | (186) | (542) | (600) | |
| CTLA-4 WT | 613 | CTLA-4 | Q75E, | GSG4S | Fc (589) |
| ECD 1 GSG4S | | ECD | R84Q | (590) | |
| Fc (G4S)4 | | (1) | (68-110) | (G4S)4 | |
| (TACI 542) | | | (542) | (600) | |
| TACI 542 | 614 | G29W/L98Q/ | Q75E, | GSG4S | Fc (589) |
| GSG4S Fc | | Y105L | R84Q | (590) | |
| (G4S)4 (CTLA- | | ECD | (68-110) | (G4S)4 | |
| 4 186) | | (186) | (542) | (600) | |
| TACI 516 | 615 | C122S | 29-110 | (G4S)2 | Fc (589) |
| (G4S)2 Fc | | ECD | WT | (594) | |
| (G4S)2 CTLA 4 | | (668) | (516) | | |
| 668 | | | | | |
| TACI 528 | 616 | CTLA-4 | 68-110 | (G4S)2 | Fc (589) |
| (G4S)2 Fc | | ECD | WT | (594) | |
| (G4S)2 CTLA 4 | | (1) | (528) | | |
| WT ECD 1 | | | | | |
| TACI 528 | 617 | C122S | 68-110 | (G4S)2 | Fc (589) |
| (G4S)2 Fc | | ECD | WT | (594) | |
| (G4S)2 CTLA 4 | | (668) | (528) | | |
| 668 | | | | | |
| CTLA-4 WT | 624 | CTLA-4 | 29-110 | (G4S)2 | Fc (589) |
| ECD 1 (G4S)2 | | ECD | WT | (594) | |
| Fc (G4S)2 TACI | | (1) | (516) | | |
| 516 | | | | | |
| CTLA 4 668 | 625 | C122S | 29-110 | (G4S)2 | Fc (589) |
| (G4S)2 Fc | | ECD | WT | (594) | |
| (G4S)2 TACI | | (668) | (516) | | |
| 516 | | | | | |
| CTLA-4 WT | 626 | CTLA-4 | 68-110 | (G4S)2 | Fc (589) |
| ECD 1 (G4S)2 | | ECD | WT | (594) | |
| Fc (G4S)2 TACI | | (1) | (528) | | |
| 528 | | | | | |
| CTLA 4 668 | 627 | C122S | 68-110 | (G4S)2 | Fc (589) |
| (G4S)2 Fc | | ECD | WT | (594) | |
| (G4S)2 TACI | | (668) | (528) | | |
| 528 | | | | | |
| CTLA 4 92 | 637 | G29W/N58S/ | 29-110 | GSG4S | Fc (589) |
| GSG4S Fc | | L63P/ | WT | (590) | |
| (G4S)2 TACI | | Q82R/L98Q/ | (516) | (G4S)2 | |
| 516 | | Y105L | | (594) | |
| | | ECD | | | |
| | | (92) | | | |
| CTLA 4 165 | 638 | T53S/L63P/ | 29-110 | GSG4S | Fc (589) |
| GSG4S Fc | | L98Q | WT | (590) | |
| (G4S)2 TACI | | ECD | (516) | (G4S)2 | |
| 516 | | (165) | | (594) | |
| CTLA-4 113 | 643 | L12F/R16H/ | R84G | GSG4S | Fc (589) |
| GSG4S Fc | | G29W/ | (68-110) | (590) | |
| (G4S)4 TACI | | M56T/L98Q/ | (535) | (G4S)2 | |
| 535 (68-110) | | Y105L | | (594) | |
| | | ECD | | | |
| | | (113) | | | |
| CTLA-4 113 | 644 | L12F/R16H/ | R84G | GSG4S | Fc (589) |
| GSG4S Fc | | G29W/ | (29-110) | (590) | |
| (G4S)4 TACI | | M56T/L98Q/ | (688) | (G4S)2 | |
| 688 (29-110) | | Y105L | | (594) | |
| | | ECD | | | |
| | | (113) | | | |
| TACI 541 | 648 | G29W/L98Q/ | K77E, | GSG4S | Fc (589) |
| GSG4S Fc | | Y105L | F78Y, | (590) | |
| (G4S)4 CTLA-4 | | ECD | Y102D | (G4S)2 | |
| 186 | | (186) | (68-110) | (594) | |
| | | | (541) | | |
| TACI 541 | 653 | CTLA-4 | K77E, | GSG4S | Fc (589) |
| GSG4S Fc | | ECD | F78Y, | (590) | |
| (G4S)4 CTLA-4 | | (1) | Y102D | (G4S)2 | |
| WT ECD 1 | | | (68-110) | (594) | |
| | | | (541) | | |
| TACI 542 | 654 | CTLA-4 | Q75E, | GSG4S | |
| GSG4S Fc | | ECD | R84Q | (590) | |
| (G4S)4 CTLA-4 | | (1) | (68-110) | (G4S)2 | Fc (589) |
| WT ECD 1 | | | (542) | (594) | |

[0963] For generation of heterodimeric multi-domain Fc fusion proteins, multimeric multi-domain immunomodulatory proteins were generated as heterodimeric molecules by “knobs-into-hole” engineering. In such an example, the heterodimer was generated by co-expressing a TIM and a BIM that each were fused to either (1) a first “knob” Fc subunit (set forth in SEQ ID NO: 669 containing the mutations S354C and T366W by EU numbering, corresponding to S139C and T151W with reference to wild-type human IgG1 Fc set forth in SEQ ID NO:586); and (2) a second “hole” Fc subunit (set forth in SEQ ID NO:670, containing the mutations Y349C, T366S, L368A and Y407V by EU numbering, corresponding to Y134C, T151S, L153A and Y192V with reference to wild-type human IgG1 Fc set forth in SEQ ID NO:586) for expression of a heterodimeric molecule. In addition, both the knob and hole Fc also contained mutations L19A, L20E, G22A to reduce effector function and contained replacement of the cysteine residue to a serine residue at position 5 (C5S), each compared to the wild-type or unmodified Fc set forth in SEQ ID NO: 586 (corresponding to C220S, L234A, L235E and G237A by EU numbering, respectively).

Knob Fc (SEQ ID NO: 669):
EPKSSDKTHTCPPCPAPEAEGAPSVFLFPPKPKDT
LMISRTPEVTCVVVDVSHEDPEVKFNWYVDGVEVH
NAKTKPREEQYNSTYRVVSVLTVLHQDWLNGKEYK
CKVSNKALPAPIEKTISKAKGQPREPQVYTLPPCR
EEMTKNQVSLWCLVKGFYPSDIAVEWESNGQPENN
YKTTPPVLDSDGSFFLYSKLTVDKSRWQQGNVFSC
SVMHEALHNHYTQKSLSLSPG
Hole Fc (SEQ ID NO: 670):
EPKSSDKTHTCPPCPAPEAEGAPSVFLFPPKPKDT
LMISRTPEVTCVVVDVSHEDPEVKFNWYVDGVEVH
NAKTKPREEQYNSTYRVVSVLTVLHQDWLNGKEYK
CKVSNKALPAPIEKTISKAKGQPREPQVCTLPPSR
EEMTKNQVSLSCAVKGFYPSDIAVEWESNGQPENN
YKTTPPVLDSDGSFFLVSKLTVDKSRWQQGNVFSC
SVMHEALHNHYTQKSLSLSPG

[0964] Table E7-B3 sets forth exemplary generated multi-domain heterodimeric immunomodulatory fusion proteins.

TABLE E7-B
Heterodimeric Multi-Domain Immunomodulatory Proteins CTLA/BCMA/TACI

| | | Protein SEQ | | | | | |
|---|---|---|---|---|---|---|---|
| | | ID NO | TIM | BIM | | | |
| | DNA | Protein SEQ | CTLA-4 | TACI | BCMA | Linker | Fc |
| | SEQ ID | ID NO + | (SEQ ID | (SEQ ID | (SEQ ID | (SEQ ID | (SEQ ID |
| Description | NO | His tag | NO) | NO) | NO) | NO) | NO) |
| CTLA-4 92 Fc + | CTLA-4 | 662 | G29W/N58S/ | | | GSG4S | Fc K |
| BCMA 357 Fc | 92 | | L63P/Q82R/ | | | (590) | (669) |
| | GSG4S | | L98Q/Y105L | | | | |
| | Fc K | | ECD | | | | |
| | | | (92) | | | | |
| | BCMA | 660 | | | H19Y | GSG4S | Fc H |
| | 357 | | | | (2-54) | (590) | (670) |
| | GSG4S | | | | (357) | | |
| | Fc H | | | | | | |
| CTLA-4 113 Fc + | CTLA-4 | 663 | L12F/R16H/ | | | GSG4S | Fc K |
| BCMA 357 Fc | 113 | | G29W/M56T/ | | | (590) | (669) |
| | GSG4S | | L98Q/Y105L | | | | |
| | Fc K | | ECD | | | | |
| | | | (113) | | | | |
| | BCMA | 660 | | | H19Y | GSG4S | Fc H |
| | 357 | | | | (2-54) | (590) | (670) |
| | GSG4S | | | | (357) | | |
| | Fc H | | | | | | |

[0965] CTLA-4-Fc (Abatacept) or BCMA-Fc (Table E8-A) were used as controls of the multi-domain immunomodulatory Fc fusion proteins.

[0966] Expression constructs encoding Fc fusion proteins of interest were transiently expressed in Exp1293 HEK293 cells (e.g. Invitrogen) with Expifectamine™ reagents and media following the manufacturer's instructions. Supermatants were harvested and protein was captured and eluted from a Protein A column using an AKTA protein purification system. The eluted material was then separated by an additional preparative SEC step to generate non-aggregated (monomeric), highly purified material. This material was buffer exchanged into 10 mM Acetate, 9% Sucrose, pH 5.0. (A5Su) The protein was vialed in a sterile biosafety cabinet and frozen at −80 C. A vial was thawed and assessed by analytical SEC to demonstrate the material was stable and predominantly non-aggregated (monomeric) after thaw.

TABLE E8-A
BCMA Fc

| | | | Protein | | | | | |
|---|---|---|---|---|---|---|---|---|
| | DNA | Protein | SEQ ID | CTLA-4 | TACI | BCMA | Linker | Fc |
| | SEQ | SEQ | NO + | (SEQ ID | (SEQ ID | (SEQ ID | (SEQ ID | (SEQ ID |
| Description | ID NO | ID NO | His tag | NO) | NO) | NO) | NO) | NO) |
| Fc (G4S)2 BCMA | | 628 | | | | 2-54 WT | (G4S)2 | Fc (589) |
| (356) | | | | | | (356) | (594) | |
| Fc (G4S)2 BCMA | | 629 | | | | H19Y | (G4S)2 | Fc (589) |
| (357) | | | | | | (2-54) | (594) | |
| | | | | | | (357) | | |

[0967] B. Monomeric Configurations

[0968] In some configurations, the generated multi-domain immunomodulatory proteins were generated as monomeric molecules containing a TIM and a BIM linked together with a peptide linker. In this example, the constructs were generated with the linker (EAAAK)6 (SEQ ID NO:665). In some cases, the monomeric immunomodulatory proteins also contained an N- or C-terminal moiety for detection and/or purification, such as a poly-histidine tag (HHHHH11-H; SEQ ID NO: 702) and/or a flag-tag (DYKDDDDK; SEQ ID NO: 588).

[0969] Table E9 describes exemplary generated multi-domain immunomodulatory monomeric proteins.

TABLE E9
Monomeric Multi-Domain Immunomodulatory Proteins

| | | Protein SEQ | | | | |
|---|---|---|---|---|---|---|
| | | ID NO | | | | |
| | DNA | | + | | TACI | |
| | SEQ | − | Flag | CTLA-4 | (SEQ ID NO) | Linker |
| | ID | His | His | (SEQ ID | BCMA | (SEQ ID |
| Description | NO | tag | tag | NO) | (SEQ ID NO) | NO) |
| TACI 516 | | 703 | 618 | CTLA-4 | 29-110 WT | (EAAAK)6 |
| (EAAAK)6 | | | | ECD | (516) | (665) |
| CTLA 4 WT | | | | (1) | | |
| ECD 1 | | | | | | |
| TACI 516 | | 704 | 619 | C122S | 29-110 WT | (EAAAK)6 |
| (EAAAK)6 | | | | ECD | (516) | (665) |
| CTLA 4 668 | | | | (668) | | |
| TACI 528 | | 705 | 620 | CTLA-4 | 68-110 WT | (EAAAK)6 |
| (EAAAK)6 | | | | ECD | (528) | (665) |
| CTLA 4 WT | | | | (1) | | |
| ECD 1 | | | | | | |
| TACI 528 | | 706 | 621 | C122S | 68-110 WT | (EAAAK)6 |
| (EAAAK)6 | | | | ECD | (528) | (665) |
| CTLA 4 668 | | | | (668) | | |
| TACI 516 | | 707 | 622 | C122S | 29-110 WT | (G4S)3 |
| (G4S)3 | | | | ECD | (516) | (595) |
| CTLA 4 668 | | | | (668) | | |
| TACI 528 | | 708 | 623 | C122S | 68-110 WT | (G4S)3 |
| (G4S)3 | | | | ECD | (528) | (595) |
| CTLA 4 668 | | | | (668) | | |

### Example 8. Bioactivity Assessment of BCMA/TACI Blockade of TACI-Mediated Stimulation by BCMA- or TACI-Containing Molecules Stacked with Ctla-4 Domains

[0970] The cell-line based bioassay described in Example 6 was used to assess the functional characterization of TACI- or BCMA-containing WT, vTD, or multi-domain proteins “stacked” with a CTLA-4 WT or vIgSF domain for blockade of APRIL or BAFF-mediated ligand signaling via the TACI receptor in the Jurkat/NF-κB/TACI cells. Exemplary stack molecules described in Example 7 were assessed. APRIL or BAFF-mediated ligand signaling was quantitated by monitoring luciferase production in the cells.

[0971] A. Bioactivity of Exemplary Multi-Domain Molecules

[0972] In one experiment, exemplary molecules set forth in Table E8 were assessed using the Jurkat/NF-κB/TACI reporter cells for blockade of APRIL- or BAFF-mediated signaling. Table E10-A provides the values for half maximal inhibitory concentration (IC50) for inhibition of APRIL- and BAFF-mediated TACI signaling. Also shown is a comparison to the corresponding WT BCMA-Fc or WT TACI-Fc controls (Δ Parental vTD) for each experiment. In some instances, the proteins tested were not compared to their parental of WT controls and appear as (−) in the Table below.

TABLE E10-A
Bioactivity of Multi-Domain Immunomodulatory Proteins

| | | | IC50 | | IC50 |
|---|---|---|---|---|---|
| | | | (nM) | | (nM) |
| | | | APRIL | | BAFF |
| | | | (Δ | IC50 | (Δ |
| | SEQ ID | IC50 (nM) | Parental | (nM) | Parental |
| Description | NO | APRIL | vTD) | BAFF | vTD) |
| TACI 516 (EAAAK)6 | 703/618 | 46.15 | 46.2 (5.0) | 7.781 | 7.8 (3.0) |
| CTLA 4 WT ECD 1 | | | | | |
| TACI516 (EAAAK)6 | 704/619 | 138 | 138.0 | 3.422 | 3.4 (1.3) |
| CTLA 4 668 | | | (15.0) | | |
| TACI 528 (EAAAK)6 | 705/620 | ND | ND | 5.305 | 5.3 (2.1) |
| CTLA 4 WT ECD 1 | | | | | |
| TACI 528 (EAAAK)6 | 706/621 | ND | ND | 5.176 | 5.2 (2.0) |
| CTLA 4 668 | | | | | |
| TACI 516 (G4S)3 CTLA4 | 707/622 | ND | ND | 8.747 | 8.7 (3.4) |
| 668 | | | | | |
| TACI 528 (G4S)3 CTLA 4 | 708/623 | ND | ND | 8.412 | 8.4 (3.3) |
| 668 | | | | | |
| CTLA-4 WT ECD 1 (G4S)2 | 624 | 19.15 | 19.2 (2.1) | 9.459 | 9.5 (3.7) |
| Fc (G4S)2 TACI 516 | | | | | |
| CTLA 4 668 (G4S)2 Fc | 625 | 19.97 | 20.0 (2.2) | 10.05 | 10.1 |
| (G4S)2 TACI 516 | | | | | (3.9) |
| CTLA-4 WT ECD 1 (G4S)2 | 626 | 37.53 | 37.5 (4.1) | 2.06 | 2.1 (0.8) |
| Fc (G4S)2 TACI 528 | | | | | |
| CTLA 4 668 (G4S)2 Fc | 627 | 8.655 | 8.7 (0.9) | 2.237 | 2.2 (0.9) |
| (G4S)2 TACI 528 | | | | | |
| TACI WT Fc | 516 | 9.173 | 9.2 (1.0) | 2.579 | 2.6 (1.0) |
| CTLA-4 WT ECD 1 GSG4S | 631 | 0.8383 | 0.8 (0.0) | 33.63 | 33.6 |
| Fc (G4S)2 BCMA 356 | | | | | (0.8) |
| CTLA-4 165 GSG4S Fc | 633 | 0.8939 | 0.9 (0.0) | 36.83 | 36.8 |
| (G4S)2 BCMA 356 | | | | | (0.9) |
| CTLA-4 92 GSG4S Fc | 632 | 0.8094 | 0.8 (0.0) | 33.46 | 33.5 |
| (G4S)2 BCMA 356 | | | | | (0.8) |
| Fc (G4S)2 BCMA (356) | 628 | 42.71 | 42.7 (1.0) | 42.71 | 42.7 |
| | | | | | (1.0) |
| CTLA-4 WT ECD 1 GSG4S | 634 | 0.6879 | 0.7 (1.0) | 3.642 | 3.6 (0.7) |
| Fc (G4S)2 BCMA 357 | | | | | |
| CTLA-4 92 GSG4S Fc | 635 | 0.6831 | 0.7 (1.0) | 6.274 | 6.3 (1.2) |
| (G4S)2 BCMA 357 | | | | | |
| CTLA-4 165 GSG4S Fc | 636 | 0.6057 | 0.6 (0.9) | 11.84 | 11.8 |
| (G4S)2 BCMA 357 | | | | | (2.2) |
| Fc (G4S)2 BCMA (357) | 629 | 0.6957 | 0.7 (1.0) | 5.439 | 5.4 (1.0) |
| CTLA 4 165 GSG4S Fc | 638 | 4.644 | 4.6 (0.9) | 0.9277 | 0.9 (0.5) |
| (G4S)2 TACI 516 | | | | | |
| CTLA 4 92 GSG4S Fc | 637 | 6.752 | 6.8 (1.3) | 1.732 | 1.7 (1.0) |
| (G4S)2 TACI 516 | | | | | |
| CTLA-4 WT ECD 1 GSG4S | 631 | 5.106 | 5.1 (1.0) | 1.698 | 1.7 (1.0) |
| Fc (G4S)2 BCMA 356 | | | | | |
| CTLA-4 113 GSG4S Fc | 643 | 8.632 | 8.6 (NA) | 0.5059 | 0.51 |
| (G4S)4 TACI 535 (68-110) | | | | | (0.4) |
| CTLA-4 113 GSG4S Fc | 644 | 8.253 | 8.5 (1.4) | 0.566 | 0.57 |
| (G4S)4 TACI 535 (29-110) | | | | | (0.4) |
| CTLA-4 WT ECD 1 GSG4S | 631 | 6.087 | 6.1 (1.0) | 1.389 | 1.39 |
| Fc (G4S)2 BCMA 356 | | | | | (1.0) |
| CTLA-4 186GSG4S-Fc- | 603 | 1.27 | 1.3 (-) | 0.2818 | 0.28 (-) |
| (G4S)4-BCMA 381 | | | | | |
| CTLA-4 186GSG4S-Fc- | 604 | 2.371 | 2.4 (-) | 0.1329 | 0.13 (-) |
| (G4S)4-BCMA 411 | | | | | |
| CTLA-4 186GSG4S-Fc- | 605 | 18.39 | 18.4 (-) | 0.1604 | 0.16 (-) |
| (G4S)4-BCMA 405 | | | | | |
| CTLA-4 186-GSG4S-Fc- | 601 | 0.9969 | 1.0 (-) | 0.4901 | 0.49 (-) |
| (G4S)4-BCMA 406 | | | | | |
| CTLA-4 186 GSG4S Fc | 610 | 1.558 | 1.6 (-) | 0.1027 | 0.10 (-) |
| (G4S)4 TACI 541 | | | | | |
| CTLA-4 186 GSG4S Fc | 612 | 2.49 | 2.5 (-) | 0.1532 | 0.15 (-) |
| (G4S)4 (TACI 542 | | | | | |
| CTLA-4 WT ECD 1 GSG4S | 606 | 0.8491 | 0.8 (-) | 0.234 | 0.23 (-) |
| Fc (G4S)4 BCMA 381 | | | | | |
| CTLA-4 WT ECD 1 GSG4S | 607 | 2.005 | 2.0 (-) | 0.1746 | 0.17 (-) |
| Fc (G4S)4 BCMA 411 | | | | | |
| CTLA-4 WT ECD 1 GSG4S | 608 | 23.13 | 23.1 (-) | 0.1956 | 0.20 (-) |
| Fc (G4S)4 BCMA 405 | | | | | |
| CTLA-4 WT ECD 1 GSG4S | 602 | 1.185 | 1.2 (-) | 0.678 | 0.68 (-) |
| Fc (G4S)4 BCMA 406 | | | | | |
| CTLA-4 WT ECD 1 GSG4S | 611 | 1.646 | 1.6 (-) | 0.1285 | 0.13 (-) |
| Fc (G4S)4 TACI 541 | | | | | |
| CTLA-4 WT ECD 1 GSG4S | 613 | 2.732 | 2.7 (-) | 0.1599 | 0.16 (-) |
| Fc (G4S)4 (TACI 542 | | | | | |
| BCMA 381 GSG4S-Fc- | 609 | 0.8762 | 0.9 (-) | 0.06175 | 0.06 (-) |
| (G4S)4-CTLA-4 186 | | | | | |
| TACI 542 GSG4S Fc | 614 | 1.2 | 1.2 (-) | 0.1786 | 0.18 (-) |
| (G4S)4 (CTLA-4 186 | | | | | |
| BCMA 357 (G4S)3 CTLA-4 | 655 | 0.6888 | 0.69 (0.7) | 0.3963 | 0.4 (0.4) |
| 92 GSG4S Fc | | | | | |
| BCMA 357 GSG4S Fc | 656 | 0.5824 | 0.58 (0.6) | 0.4155 | 0.4 (0.4) |
| (G4S)3 CTLA-4 92 | | | | | |
| CTLA-4 92 (G4S)4 BCMA | 657 | 0.63 | 0.63 (0.6) | 3.754 | 3.8 (3.8) |
| 357 GSG4S Fc | | | | | |
| CTLA-4 92 GSG4S Fc | 658 | 0.5499 | 0.55 (0.5) | 0.5481 | 0.6 (0.6) |
| (G4S)3 BCMA 357 | | | | | |
| CTLA-4 92 GSG4S Fc | 659 | 0.6873 | 0.69 (0.7) | 0.7649 | 0.8 (0.8) |
| (G4S)5 BCMA 357 | | | | | |
| BCMA WT-Fc | 356 | 1.026 | 1.03 (1.0) | 0.9946 | 1.0 (1.0) |
| CTLA-4 92 Fc K + BCMA | 662 | 4.19 | 4.2 (4.2) | 5.385 | 5.4 (5.4) |
| 357 Fc H | 660 | | | | |
| CTLA-4 113 Fc K/BCMA | 663 | 5.203 | 5.2 (5.2) | 5.153 | 5.2 (5.2) |
| 357 Fc H | 660 | | | | |
| BCMA WT-Fc | 356 | 1.026 | 1.0 (1.0) | 0.9946 | 1.0 (1.0) |

[0973] B. Activity of Variant BCMA to Inhibit BAFF and APRIL, or BCMA or TACI vTDs Combined as a Multi-Domain Immunomodulatory Protein with Variant CTLA-4 vIgD

[0974] As shown in FIG. 3A, a BCMA vTD demonstrated comparable activity whether it is used as a single domain or included as part of a multidomain stacked molecule. As shown in FIG. 3B, BCMA vTDs included in stack molecules are interchangeable and can be used to modulate ligand inhibition.

[0975] As shown in FIG. 3C, TACI vTDs included as mutlidomain stacked molecules demonstrate the ability to block both APRIL and BAFF. As shown in FIG. 3D, TACI vTDs included in stack molecules are interchangeable and can be used to modulate ligand inhibition.

[0976] As shown in FIG. 4, exemplary BCMA vTD-Fcs and stacks containing BCMA or TACI vTDs with CTLA-4 vIgD inhibit mouse APRIL and BAFF ligand signaling. Together, the results show the ability of the multidomain stack molecules to block APRIL and BAFF ligand signaling (in this example exemplified via TACI-mediated signaling) similarly to the single domain controls.

[0977] C. Comparison of Variant BCMA vTDs and BCMA and TACI vTD Multi-Domain Immunomodulatory Proteins for Blockade of APRIL and BAFF Mediated Signaling Relative to Fc Fusion Containing ECD Portions Present in Atacicept or Telitacicept

[0978] In another similar study, exemplary generated molecules as described in Example 7 were assessed for their ability to block APRIL or BAFF-mediated ligand signaling in Jurkat/NF-κB/TACI cells. For comparison, control molecules were generated containing wild-type TACI ECD fused the Fc sequence set forth in SEQ ID NO: 589. In one control, the fusion protein contained WT TACI (TACI 30-110, SEQ ID NO:718; corresponding to the TACI ECD portion in atacicept, SEQ ID NO:720). In another control, the fusion protein contained WT TACI (TACI 13-118, SEQ ID NO:719), corresponding to the TACI ECD portion in telitacicept). Activity was compared to the control molecules. Activity also was compared to the anti-BAFF monoclonal antibody belimumab.

[0979] Exemplary BCMA molecules, either WT or variant BCMA vTDs alone or multi-domain molecules further combined with a variant CTLA-4 IgSF, were titrated (between 100,000 pM-32 pM), added to 2 nM recombinant human APRIL or BAFF and assayed as described above for the Jurkat/NF-κB assay. As shown in FIG. 5A, the exemplary molecules containing a BCMA TD alone or as a multdomain protein exhibited enhanced APRIL blockade, but not BAFF blockade, compared to TACI 30-110-Fc, TACI 13-118-Fc and belimumab.

[0980] Exemplary TACI molecules, either WT vTDs or WT and vTD multi-domain molecules further combined with a variant CTLA-4 IgSF, were titrated (between 100,000 pM-32 pM), added to 2 nM recombinant human APRIL or BAFF and assayed as described above for the Jurkat/NF-κB assay. As shown in FIG. 5B, the exemplary molecules containing TACI vTDs as a multi-domain protein exhibited enhanced APRIL and BAFF blockade greater than TACI 30-100-Fc, TACI 13-118-Fc and belimumab. WT TACI-Fc containing only the CRD2 domain of TACI also exhibited enhanced APRIL blockade greater than TACI 30-100-Fc and TACI 13-118-Fc. These results are consistent with a finding that the minimal CRD2 domain (containing amino acids residues 68-110) exhibits improved blockade of APRIL compared to TACI ECD molecules also containing portions of the CRD1 domain as present in atacicept and telitacicept.

[0981] Table E10-B provides the values for half maximal inhibitory concentration (IC50) for inhibition of APRIL- and BAFF-mediated TACI signaling for the exemplary molecules described in FIG. 5A and FIG. 5B. Also shown in parentheses is the relative blockage compared to atacicept (A atacicept) for each tested molecule.

TABLE E10-B
Bioactivity of Multi-Domain Immunomodulatory Proteins vs atacicept

| | | IC50 | IC50 (nM) | IC50 (nM) BAFF |
|---|---|---|---|---|
| | SEQ | (nM) | APRIL (Δ TACI | (Δ TACI 30-110- |
| Description | ID NO | APRIL | 30-110-Fc) | Fc) |
| 381 BCMA-Fc | 381 | 180 | 180(0.05) | 1778(0.31) |
| 406 BCMA-Fc | 406 | 190 | 190(0.05) | 1532(0.27) |
| 411 BCMA-Fc | 411 | 209 | 209(0.05) | 781(0.14) |
| CTLA-4 186- | 601 | 269 | 269(0.07) | 2628(0.46) |
| GSG4S-Fc- | | | | |
| (G4S)4-BCMA | | | | |
| 406 | | | | |
| 356 BCMA-Fc | 356 | 183 | 183(0.05) | 823(0.14) |
| CTLA-4 186 | 610 | 272 | 272(0.07) | 1259(0.22) |
| GSG4S Fc | | | | |
| (G4S)4 TACI | | | | |
| 541 | | | | |
| 528 TACI | 528 | 369 | 369(0.10) | 1328(0.23) |
| CRD2-Fc | | | | |
| TACI 13-118-Fc | 719 | 9103 | 9103(2.37) | 7699(1.33) |
| Belimumab | | 214911 | 214911(55.84) | 2496(0.43) |
| TACI 30-110-Fc | 718 | 3849 | 3849(1.00) | 5771(1.00) |

### Example 9. Bioactivity Assessment of CD80/CD86 Blockade of CD28-Mediated Costimulation by CTLA-4 when Stacked with Wild-Type or Affinity-Matured BCMA or TACI Domains

[0982] This Example describes functional characterization of WT, vIgD, or stack proteins containing CTLA-4 by blockade of CD80/CD86 and inhibition of CD28-mediated costimulation with a cell line-based in vitro bioassay.

[0983] Jurkat cells expressing luciferase driven by an interleukin-2 (IL-2) promoter were purchased (Promega). Jurkat cells, a human T cell leukemia cell line, endogenously express T-cell receptor (TCR)-CD3 complexes and CD28. Upon interaction with CD80 or CD86, CD28 signaling mediates transcriptional upregulation of the IL-2 promoter. Activation of Jurkat cells via anti-CD3 and costimulation via CD80 or CD86 results in luciferase production. Luciferase is quantitated as described in Example 6. K562 cells, a human myelogenous leukemia cell line, were transduced to stably express cell surface anti-human CD3 (OKT3) single chain fragment variable (scFv) and human CD80 or CD86 (K562/OKT3/CD80 or CD86) to generate artificial antigen presenting cells (aAPCs). A schematic of the Jurkat/IL-2 assay is shown in FIG. 6.

[0984] To determine bioactivity of CTLA-4 WT or vIgDdomains, stack proteins containing these domains were titrated (ranging 100 nM-256 pM) and plated into a 96-well, white flat-bottom plate in 33 μL of media (RPMI1640+5% FBS). aAPCs were added to proteins at 2×10⁴ cell/well in 33 μL media and incubated for 20 minutes at RT, with shaking. Jurkat/IL-2 cells were added at 2×10⁵ cell/well to bring the final volume/well to 100 uL. APCs and Jurkat cells were incubated for 5 hours at 37° C. in a humidified 5% CO₂ incubation chamber. Plates were processed and luminescence quantified as described above. Decreased RLU in the presence of CTLA-4 WT or vIgD, or CTLA-4 stacks relative to control proteins represent blockade of CD80 or CD86 and inhibition of CD28-mediated costimulation in the Jurkat/IL-2 cells.

[0985] Table E11 provides the values for half maximal inhibitory concentration (IC50) for inhibition of CD80- and CD86-mediated CD28 signaling. Also shown is a comparison to the WT-CTLA-4-Fc reference control abatacept (Δ Parental CTLA-4-Fc) for each experiment. In some instances, the proteins tested were not compared to their parental of WT controls and appear as (−) or IC50 valued were not determined (ND).

TABLE E11
Bioactivity of Multi-Domain Immunomodulatory Proteins

| | | | CD80 | | CD86 |
|---|---|---|---|---|---|
| | | | IC50 | | IC50 |
| | | | (nM) | | (nM) |
| | SEQ | CD80 | (Δ | CD86 | (Δ |
| | ID | IC50 | Parental | IC50 | Parental |
| Description | NO | (nM) | CTLA-4) | (Δ AWT) | CTLA-4) |
| CTLA-4 186 GSG4S-Fc- | 603 | 26.1 | 26.1 (0.8) | 11.9 | 11.9 |
| (G4S)4-BCMA 381 | | | | | (1.5) |
| CTLA-4 186GSG4S-Fc- | 604 | 32.7 | 32.7 (1.0) | 9 | 9.0 (1.1) |
| (G4S)4-BCMA 411 | | | | | |
| CTLA-4 186GSG4S-Fc- | 605 | 70.1 | 70.1 (2.1) | 10.8 | 10.8 |
| (G4S)4-BCMA 405 | | | | | (1.3) |
| CTLA-4 186-GSG4S-Fc- | 601 | 25.2 | 25.2 (0.8) | 8.1 | 8.1 (1.3) |
| (G4S)4-BCMA 406 | | | | | |
| CTLA-4 186 GSG4S Fc | 610 | 56.9 | 56.9 (1.7) | 10.2 | 10.2 |
| (G4S)4 TACI 541 | | | | | (1.2) |
| CTLA-4 186 GSG4S Fc | 612 | 82.6 | 82.6 (2.5) | 9 | 9.0 (1.1) |
| (G4S)4 (TACI 542 | | | | | |
| 186 CTLA-4-Fc | 186 | 33.6 | 33.6 (1.0) | 8.2 | 8.2 (1.0) |
| CTLA-4 WT ECD 1 | 606 | 9.4 | 9.4 (1.1) | ND | ND |
| GSG4S Fc (G4S)4 | | | | | |
| BCMA 381 | | | | | |
| CTLA-4 WT ECD 1 | 607 | 10.9 | 10.9 (1.3) | ND | ND |
| GSG4S Fc (G4S)4 | | | | | |
| BCMA 411 | | | | | |
| CTLA-4 WT ECD 1 | 608 | 5.7 | 5.7 (0.7) | ND | ND |
| GSG4S Fc (G4S)4 | | | | | |
| BCMA 405 | | | | | |
| CTLA-4 WT ECD 1 | 602 | 11.9 | 11.9 (1.4) | ND | ND |
| GSG4S Fc (G4S)4 | | | | | |
| BCMA 406 | | | | | |
| CTLA-4 WT ECD 1 | 611 | 10.3 | 10.3 (1.2) | ND | ND |
| GSG4S Fc (G4S)4 | | | | | |
| TACI 541 | | | | | |
| CTLA-4 WT ECD 1 | 613 | 9.5 | 9.5 (1.1) | ND | ND |
| GSG4S Fc (G4S)4 | | | | | |
| (TACI 542 | | | | | |
| Abatacept | | 8.6 | 8.6 (1.0) | ND | ND |
| CTLA-4 92 GSG4S Fc | 635 | 22.7 | 22.7 (-) | 16.1 | 16.1 (-) |
| (G4S)2 | | | | | |
| BCMA 357 | | | | | |

[0986] FIGS. 7A and 7B provide further results of exemplary molecules. Blockade of CD80 and CD86 and inhibition of CD28-mediated costimulation for exemplary molecules containing a WT CTLA-4 IgD (FIG. 7A) or a CTLA-4 vIgD (FIG. 7B).

[0987] Together, the results show the ability of the multidomain stack molecules to block CD28-mediated costimulation similarly, or in some cases superior to, the single domain CTLA-4 ECD-Fc reference control abatacept. Specifically, stack molecules containing a CTLA-4 vIgD exhibited substantially improved ability to block CD86-mediated CD28 co-stimulation consistent with their increased affinity for CD86 compared to wild-type CTLA-4.

### Example 10. Bioactivity Assessment of BCMA or TACI Domain-Containing Molecules in a Primary Follicular Helper T Cell (Tfh) and B Cell Co-Culture Assay

[0988] Bioactivity of WT BCMA-Fc, WT TACI-Fc, BCMA vTD-Fc, or exemplary multidomain stack molecules containing BCMA or TACI vTD with CTLA-4 IgSF domains were tested in a primary T and B cell assay. Exemplary multidomain molecules described in Example 7 and Table E7 were tested.

[0989] Primary cells were obtained from a leukocyte reduction system (LRS) cone (Bloodworks Northwest). The cone was processed and peripheral blood mononuclear cells (PBMCs) were isolated via density gradient centrifugation. Total B cells were isolated from PBMCs using a negative selection kit (StemCell Technologies, catalog #17954) following the manufacturer's supplied protocol. Total CD4+ T cells were isolated from whole PBMCs using a negative selection kit (StemCell Technologies, catalog #17952). CD4+ T cells were further purified to yield Tfh via CXCR5 positive selection. CXCR5 beads were prepared using a “Do-It-Yourself” kit (StemCell Technologies, catalog #17699) by binding purified anti-human CXCR5 antibody (Biolegend) to magnetic particles. Tfh (CXCR5+CD4+ T) cells were isolated following the manufacturer's supplied protocol. Artificial antigen presenting cells (aAPCs) (K562/CD80) were prepared by fixation with mitomycin C (100 μg/mL final) for 30 minutes at 37° C. aAPCs were washed three times with RPMI containing FBS and suspended in serum-free X-Vivo 15™ supplemented medium (X-Vivo 15™ containing 1X GlutaMAX, 1X Penicillin-Streptomycin) after the final wash.

[0990] B cells were plated into 96-well tissue culture treated plates at 5.5-7.0×10⁴ cells/well with recombinant IL-21 (BioLegend, 80 ng/ml final) in 50 μL media. Tfh cells were added at 2.0-7.0×10³ cell/well in 50 μL. Fc fusion proteins containing WT BCMA or TACI, BCMA vTDs, or CTLA-4-Fc-BCMA/TACI multidomain stacks were titrated and added in 50 μL (ranging 100 nM-32 pM) in triplicate. APCs were added at 2.0-5.0×10³ cell/well with soluble anti-CD3 antibody (OKT3) (BioLegend, 10 nM final) in 50 μL. Plates were incubated 7 days at 37° C. with 5% CO₂.

[0991] Tfh-B cell co-culture plates were centrifuged and supernatants were transferred to 96-well polypropylene plates and frozen at −20° C. until secreted immunoglobulin could be measured by multiplex analysis (MAGPIX® System, Millipore EMD). Cell recovery and activation was determined by flow cytometric analysis using two staining panels. Panel 1 contained anti-CD19-BUV395, anti-CD38-BV421 (or BV785), anti-human IgG-PE (or APC), anti-CD138-APC (or PE), anti-IgD-BV605, anti-IgM-PerCP-C5.5, anti-CD3-BUV737, anti-CD27-BV510, anti-CD10-BV711, and LIVE/DEAD™ Near-IR fixable stain. Panel 2 contained anti-CD19-BUV395, anti-ICOS-PE, anti-CD40L-BV605, anti-CD4-PerCP-Cy5.5, anti-CD86-BV711 (or anti-CD19-BV711 in lieu of anti-CD19-BUV395), and anti-CD28-APC, and LIVE/DEAD™ Near-IR fixable stain. All antibodies were used at 1 μg/ml with the following exceptions: anti-human IgG-PE and anti-human IgG-AF647 were used at 0.25 μg/ml. Anti-CD19-BUV395 was diluted 1:50 and anti-CD3-BUV737 was diluted to 1:40 into their respective stain cocktails. Cells were analyzed on an LSRII flow cytometer (BD Biosciences).

[0992] Inhibition of CD4+ T cell recovery and activation as demonstrated by the lack of CD40L and ICOS upregulation for exemplary WT, vIgD, or CTLA-4 stack proteins with TACI or BCMA are shown in FIG. 8A (CD4+ T cell recovery), FIG. 8B (CD4+CD40L+ cell recovery), and FIG. 8C (CD4+ICOS+cell recovery). In this example, all molecules contained the same CTLA-4 vIgD. Inhibition of T cell activity was only observed for molecules that contained a CTLA-4 IgSF domain, including by the CTLA-4-containing multidomain stack molecules containing TACI or BCMA TD. Similar levels of T cell inhibition were observed whether the particular CTLA-4 IgSF was used as a single domain or included as part of a multidomain stacked molecule.

[0993] Inhibition of total B cell recovery and B cell activation as demonstrated from the lack of CD86 upregulation for exemplary proteins are shown in FIG. 8D (CD19+ B cell recovery) and FIG. 8E (B cell activation/upregulation of CD86), respectively. Inhibition of IgM secretion from B cells for exemplary proteins are shown in FIG. 8F. Inhibition of B cell activity was only observed for multidomain stack molecules containing a TACI vTD or a BCMA vTD.

### Example 11. Assessment of the Activity of Multi-Specific Constructs in an In Vivo KLH Immunization Model

[0994] This Example describes the assessment of exemplary tested multidomain stack proteins (described in Example 7 and Table E7) to affect immune responses to keyhole limpet hemocyanin (KLH) in vivo in mice. The mouse KLH immunization model can be used to evaluate the effects of the immunomodulatory molecules on antigen-specific responses to the T cell-dependent antigen KLH, following either one or two injections of KLH. Two injections of KLH, each separated by at least 7 days, provides a model that can test a secondary immune response in the period following the 2^{nd} injection. This Example describes a study that evaluated the multidomain stack molecules, as compared to molar-matched levels of an Fe isotype control protein and abatacept, in response to two injections of KLH (on Day 1 and Day 13). Activity of test articles observed in the mouse KLH model can often predict their immunomodulatory effects in humans.

[0995] To begin the KLH study, 10-week old female C57/BL6NJ mice (The Jackson Laboratories, Sacramento, Calif.) were randomized into 6 groups of 5 mice each and dosed with the test articles as outlined in Table E12 via intraperitoneal (IP) injection (dosed on Days 0, 6 and 12). Mice were administered 0.25 mg KLH (EMD Millipore, Cat. 374825-25 MG) via IP injection on Days 1 and 13. The original commercial stock solution of KLH was diluted 4-fold with Dulbecco's phosphate-buffered saline (DPBS). Three mice remained untreated/uninjected as naïve controls (Group 7).

TABLE E12
Test Article Descriptions and Dose Regimen

| Group | # of | | Dose | Dose Volume | Dose Schedule | Route of |
|---|---|---|---|---|---|---|
| # | Mice | Test Article(s) | Level | (mL/kg) | (D = Study Day) | Delivery |
| 1 | 5 | Fc control | 0.1 mg | 12.5 | D0, 6, 12 | IP |
| 2 | 5 | Abatacept | 0.17 mg | 12.5 | D0, 6, 12 | IP |
| 3 | 5 | CTLA-4 186- | 0.20 mg | 12.5 | D0, 6, 12 | IP |
| | | GSG4S-Fc-(G4S)4- | | | | |
| | | BCMA 406 (SEQ | | | | |
| | | ID NO: 601) | | | | |
| 4 | 5 | CTLA-4 186 GSG4S | 0.20 mg | 12.5 | D0, 6, 12 | IP |
| | | Fc (G4S)4 TACI 541 | | | | |
| | | (SEQ ID NO: 610) | | | | |
| 5 | 5 | CTLA-4 WT ECD 1 | 0.20 mg | 12.5 | D0, 6, 12 | IP |
| | | GSG4S Fc (G4S)4 | | | | |
| | | BCMA 406 (SEQ ID | | | | |
| | | NO: 602) | | | | |
| 6 | 5 | CTLA-4 WT ECD 1 | 0.20 mg | 17.5 | D0, 6, 12 | IP |
| | | GSG4S Fc (G4S)4 | | | | |
| | | TACI 541 (SEQ ID | | | | |
| | | NO: 611) | | | | |
| 7 | 3 | None (naive controls) | N/A | N/A | N/A | N/A |

N/A = not applicable

[0996] On Day 19, all mice were anesthetized with isoflurane and blood collected into serum separator tubes. Mice were sacrificed, and their spleens removed, weighed, and placed into DPBS on ice. Whole blood was centrifuged, and the serum removed and stored at −80° C. until analyzed for anti-KLH levels by enzyme-linked immunosorbent assay (ELISA). Spleens were processed to single cell suspensions, the red blood cells (RBC) lysed using RBC Lysis Buffer (Biolegend, Cat. 420301) according to the manufacturer's instructions, and the cells counted in each sample using dual-fluorescence viability, using acridine orange/propidium iodide (AO/PI) staining (Nexcelom, Cat. CS2-0106-5 mL).

[0997] Each spleen sample was then stained for flow cytometry analysis of immune cell subsets using the following method: 1×10⁶ live cells were placed into a well of two 96-well plates (Coming, Cat. 3797; one plate for a B cell-specific panel and one for a T cell-specific panel), centrifuged at 1500×g for 10 seconds, the supernatant removed, and the cell pellet washed twice with DPBS. The pellets were resuspended in 100 μL of live-dead stain (LIVE/DEAD Fixable Aqua Dead Cell Stain Kit, Life Technologies Corp., 1:1000 dilution in DPBS) and incubated for 10 min in the dark at room temperature. Following two washes with flow cytometry buffer (175 μL each), tumor pellets were resuspended in Mouse BD Fc Block (diluted 1:50 with flow buffer), and incubated in the dark for an additional 5 min at RT. Without any additional washes, 50 μL of a cocktail of the following flow cytometry antibodies (diluted in flow cytometry buffer) were added to each well of cells for the B or T cell panels. For the B cell panel, the following antibodies were combined for the cocktail: anti-mouse CD19 BUV395 (clone 1D3, Becton-Dickinson; 1:100), anti-mouse CD138 BV421 (clone 281-2, BioLegend Inc.; 1:100, final concentration), anti-mouse CD3E BV510 (clone 17A2, BioLegend Inc.; 1:100, final concentration), anti-mouse IgD BV605 (clone 11-26c.2a, BioLegend Inc.; 1:100, final concentration), anti-mouse B220 BV785 (clone RA3-6B2, BioLegend Inc.; 1:100, final concentration), anti-mouse CD95 FITC (clone SA367H8, BioLegend Inc.; 1:100, final concentration), anti-mouse CD23 PerCP Cy5.5 (clone B3B4, BioLegend Inc.; 1:100, final concentration), anti-mouse GL7 PE (clone GL7, BioLegend Inc.; 1:100, final concentration), anti-mouse Gr1 PE Cy7 (clone RB6-8C5, BioLegend Inc.; 1:100, final concentration), anti-mouse CD21 APC (clone 7E9, BioLegend Inc.; 1:100, final concentration), and anti-mouse IgM APC Cy7 (clone RMM-1, BioLegend Inc.; 1:100, final concentration). For the T cell panel, the following antibodies were combined for the cocktail: anti-mouse PD-1 BV421 (clone 29F.1A12, BioLegend Inc.; 1:100, final concentration), anti-mouse CD11b BV510 (clone M1/70, BioLegend Inc.; 1:100, final concentration), anti-mouse CD3ε BV605 (clone 145-2C11, BioLegend Inc.; 1:100, final concentration), anti-mouse CD8 BV785 (clone 53-6.7, BioLegend Inc.; 1:100, final concentration), anti-mouse CD44 FITC (clone IM7, BioLegend Inc.; 1:100, final concentration), anti-mouse CD4 PerCP Cy5.5 (clone GK1.5, BioLegend Inc.; 1:100, final concentration), anti-mouse CD62L PE (clone MEL-14, BioLegend Inc.; 1:100, final concentration), anti-mouse CXCR5 PE Dazzle (clone L138D7, BioLegend Inc.; 1:100, final concentration), anti-mouse CD25 PE Cy7 (clone PC61.5, BioLegend Inc.; 1:100, final concentration), and anti-mouse CD45 AF700 (clone 30-F11, BioLegend Inc.; 1:100, final concentration). The cells were incubated with one of the antibody cocktails in the dark, on ice, with gentle mixing for 45 min, followed by two washes with flow cytometry buffer (175 μL per wash). Cell pellets were resuspended in 200 μL flow cytometry buffer and collected on an LSRII flow cytometer. Data were analyzed using FlowJo software version 10.2 (FlowJo LLC, USA) and graphed using GraphPad Prism software (Version 8.1.2). Key cellular subset identification analysis included: total B cells (B220⁺ cells), marginal zone (MZ) B cells (B220⁺, CD19⁺, CD23⁻, CD21^{high}, IgM^{high} cells), germinal center (GC) B cells (B220+, CD19+, GL7+, CD95⁺ cells), T follicular helper (Tfh) cells (CD45⁺, CD3⁺, CD4⁺, PD1⁺, CD185⁺ cells), CD4⁺ T effector memory (Tₑₘ) cells (CD45⁺, CD3⁺, CD4⁺, CD44⁺, CD62L⁻ cells), and CD8⁺ Tₑₘ cells (CD45⁺, CD3⁺, CD8⁺, CD44⁺, CD62L⁻ cells).

[0998] Statistically significant differences (p<0.05) between groups for all analyses were determined by one-way analysis of variance (ANOVA) or unpaired Student's t-test using GraphPad Prism software (Version 8.1.2).

[0999] To determine the extent to which the multidomain stack molecules inhibited KLH-mediated antibody immune responses compared to an Fc isotype control (SEQ ID NO:589), serum samples were evaluated for concentrations of anti-KLH antibodies by one of two ELISA assays. The ELISA assays measured either IgM- or IgG1-specific anti-KLH levels in the serum, and utilized assays in which mouse serum samples at numerous dilutions were incubated in plates coated with KLH, followed by washes and detection with 1:2000 goat anti-mouse IgGL:HRP or 1:5000 goat anti-mouse IgM:HRP. Color development was achieved using a TMB Substrate Kit (SeraCare) and the ELISA plates analyzed on a plate reader (EMax® Plus Microplate Reader, Molecular Devices LLC). There was no standard curve for the assay, thus optical density (OD) was used to compare the levels of anti-KLH antibodies; the higher the OD, the greater the levels of anti-KLH antibodies in the serum sample. For anti-KLH IgM OD levels, data are presented in FIG. 9 and statistical analysis by 1-way ANOVA and Tukey's multiple comparison test presented in Table E13; anti-KLH IgG1 OD levels are presented in FIG. 10 and statistical analysis by 1-way ANOVA and Tukey's multiple comparison test presented in Table E14A. Results demonstrate that each of the tested multidomain stack molecules were each able to significantly reduce anti-KLH IgM levels in serum compared to Fc control treatment, with CTLA-4 186 GSG4S Fc (G4S)4 TACI 541 (SEQ ID NO: 610) demonstrating the biggest reductions amongst all test articles. Abatacept treatment had no effect on the levels of anti-KLH IgM levels in serum compared to Fc control treatment. Each of the multidomain stack molecules tested also were able to significantly reduce anti-KLH IgG1 levels compared to Fc control, with CTLA-4 186 GSG4S Fc (G4S)4 TACI 541 (SEQ ID NO: 610) again demonstrating the greatest reductions. Abatacept was also able to significantly reduce the anti-KLH IgG1 levels in serum, but exemplary multidomain stack molecules were as effective or induced more dramatic reductions than abatacept (FIG. 10). These results indicate that these multidomain stack molecules are efficacious at reducing T cell-dependent antibody immune responses and do so as well as or better than abatacept, a commercially available and approved therapeutic for many autoimmune and inflammatory diseases.

TABLE E13
Statistical Analysis anti-KLH IgM OD levels

| Comparison | p-value |
|---|---|
| Fc control vs CTLA-4 186-GSG4S-Fc-(G4S)4 BCMA | <0.05 |
| 406 | |
| Fc control vs CTLA-4 186 GSG4S Fc (G4S)4 TACI 541 | =0.0001 |
| Fc control vs CTLA-4 WT ECD 1 GSG4S Fc (G4S)4 | <0.01 |
| TACI 541 | |
| Fc control vs naïve | <0.001 |
| CTLA-4 186 GSG4S Fc (G4S)4 TACI 541 | <0.0001 |
| vs | |
| CTLA-4 WT ECD 1 GSG4S Fc (G4S)4 BCMA 406 | |
| CTLA-4 186-GSG4S-Fc-(G4S)4 BCMA 406 | =0.0115 |
| vs | |
| CTLA-4 WT ECD 1 GSG4S Fc (G4S)4 BCMA 406 | |
| CTLA-4 WT ECD 1 GSG4S Fc (G4S)4 BCMA 406 | =0.0035 |
| vs | |
| CTLA-4 WT ECD 1 GSG4S Fc (G4S)4 TACI 541 | |
| CTLA-4 WT ECD 1 GSG4S Fc (G4S)4 BCMA 406 | <0.001 |
| vs | |
| naïve | |

TABLE E14A
Statistical Analysis anti-KLH IgG1 OD levels

| Comparison | p-value |
|---|---|
| Fc control vs abatacept | =0.0024 |
| Fc control vs CTLA-4 186-GSG4S-Fc-(G4S)4 BCMA 406 | =0.0044 |
| Fc control vs CTLA-4 186 GSG4S Fc (G4S)4 TACI 541 | =0.0006 |
| Fc control vs CTLA-4 WT ECD 1 GSG4S Fc (G4S)4 | =0.0017 |
| TACI 541 | |
| Fc control vs naive | =0.0032 |

[1000] As shown in FIG. 11, mice treated with CTLA-4 186 GSG4S Fc (G4S)4 TACI 541 (SEQ ID NO: 610) had significantly smaller spleens at the end of the study (Day 19) compared to Fc control-treated mice (p<0.001 by t-test), as did mice treated with CTLA-4 WT ECD 1 GSG4S Fc (G4S)4 TACI 541 (SEQ ID NO:611) compared to Fc1.1-treated mice (p=0.01 by t-test). Mice treated with the multidomain stack molecule CTLA-4 186-GSG4S-Fc-(G4S)4-BCMA 406 (SEQ ID NO:601) tended to have smaller spleens compared to Fc1.1-treated mice, but the difference was not quite statistically different (p=0.087 by t-test). There were no differences between the Fc isotype control-treated mice and the näive mice or mice treated with abatacept or CTLA-4 WT ECD 1 GSG4S Fc (G4S)4 BCMA 406 (SEQ ID NO: 602, which contained the same BCMA vTD as the multidomain stack molecule in SEQ ID NO:601, but contained a WT CTLA-4 IgD instead of a vIgD. The smaller spleens are indicative of reductions in lymphocytes, which can have immunomodulatory effects on the pathogenesis of autoimmune and inflammatory diseases associated with heightened immune responses, particularly those driven by B and/or T cells. Statistical analysis of spleen weights is shown in in Table E14B.

TABLE E14B
Statistical Analysis of Spleen Weights

| Spleen weight | p-value |
|---|---|
| Fc control vs. CTLA4 186 GSG4S Fcl.1 (G4S)4 | 0.0040 |
| TACI 541 | |
| Abatacept vs. CTLA4 186-GSG4S-Fcl.1-(G4S)4-BCMA | 0.0025 |
| 406 | |
| Abatacept vs. CTLA4 186 GSG4S Fcl.1 (G4S)4 | <0.0001 |
| TACI 541 | |
| Abatacept vs. CTLA4 WT ECD 1 GSG4S Fcl.1 (G4S)4 | 0.0021 |
| TACI 541 | |

[1001] Along these lines, of particular importance to the pathogenesis of autoimmune and inflammatory diseases are cell types that promote B cell survival and differentiation, antibody production, and T cell effector memory. These cell types include, but are not limited to, the following: B cells, marginal zone (MZ) B cells, germinal center (GC) B cells, T follicular helper (Tfh) cells, and CD4+ and CD8+ T effector memory (Tₑm) cells. Therapeutics whose mechanisms of action include reducing these cell types would be anticipated to be efficacious in the treatment of numerous autoimmune and inflammatory diseases. As shown in FIG. 12A-12H, certain tested multidomain stack molecules were able to reduce the percentage and number per spleen of B cells, MZ B cells, GC B cells, and Tfh as compared to the Fc isotype control (SEQ ID NO:589), with CTLA-4 186 GSG4S Fc (G4S)4 TACI 541 (SEQ ID NO: 610) being the most potent of the variants, followed by CTLA-4 186-GSG4S-Fc-(G4S)4-BCMA 406 (SEQ ID NO:601), and then CTLA-4 WT ECD 1 GSG4S Fc (G4S)4 TACI 541 (SEQ ID NO:611) containing a WT CTLA-4 IgD and a TACI vTD. These multidomain stack molecules were as effective or better than abatacept in their ability to reduce the percentage or numbers of these populations that are important in B cell survival and differentiation and antibody production. Statistical analysis of the exemplary multidomain stack molecules compared to Fc control or abatacept is shown in Table E15.

TABLE E15
Statistical Analysis

| | |
|---|---|
| Comparison | p-value |

B220+ cells as a % of live cells

| | |
|---|---|
| Fc control vs CTLA-4 186-GSG4S-Fc-(G4S)4 BCMA | <0.0001 |
| 406 | |
| Fc control vs CTLA-4 186 GSG4S Fc (G4S)4 TACI 541 | <0.0001 |
| Fc control vs CTLA-4 WT ECD 1 GSG4S Fc (G4S)4 | 0.0344 |
| BCMA 406 | |
| Fc control vs CTLA-4 WT ECD 1 GSG4S Fc (G4S)4 TACI | <0.0001 |
| 541 | |
| Abatacept vs CTLA-4 186-GSG4S-Fc-(G4S)4 BCMA | <0.0001 |
| 406 | |
| Abatacept vs CTLA-4 186 GSG4S Fc (G4S)4 TACI 541 | <0.0001 |
| Abatacept vs CTLA-4 WT ECD 1 GSG4S Fc (G4S)4 TACI | 0.0002 |
| 541 | |

Marginal zone (MZ) B cells as a % of B cells

| | |
|---|---|
| Fc control vs CTLA-4 186-GSG4S-Fc-(G4S)4 BCMA | 0.0082 |
| 406 | |
| Fc control vs CTLA-4 186 GSG4S Fc (G4S)4 TACI 541 | <0.0001 |
| Fc control vs CTLA-4 WT ECD 1 GSG4S Fc (G4S)4 TACI | 0.0007 |
| 541 | |
| Abatacept vs CTLA-4 186-GSG4S-Fc-(G4S)4 BCMA | 0.0001 |
| 406 | |
| Abatacept vs CTLA-4 186 GSG4S Fc (G4S)4 TACI 541 | <0.0001 |
| Abatacept vs CTLA-4 WT ECD 1 GSG4S Fc (G4S)4 TACI | <0.0001 |
| 541 | |

Germinal center B cells as % of live B cells

| | |
|---|---|
| Fc control vs Abatecept | 0.0065 |
| Fc control vs CTLA-4 186-GSG4S-Fc-(G4S)4 BCMA | 0.0085 |
| 406 | |
| Fc control vs CTLA-4 186 GSG4S Fc (G4S)4 TACI 541 | 0.0016 |
| Fc control vs CTLA-4 WT ECD 1 GSG4S Fc (G4S)4 TACI | 0.0663 |
| 541 | |
| Abatacept vs CTLA-4 WT ECD 1 GSG4S Fc (G4S)4 | 0.0006 |
| BCMA 406 | |

CD4+ T follicular helper (Tfh) cells as a % of CD4+ cells

| | |
|---|---|
| Fc control vs Abatacept | 0.0341 |
| Fc control vs CTLA-4 186-GSG4S-Fc-(G4S)4 BCMA | 0.0005 |
| 406 | |
| Fc control vs CTLA-4 186 GSG4S Fc (G4S)4 TACI 541 | <0.0001 |
| Fc control vs CTLA-4 WT ECD 1 GSG4S Fc (G4S)4 TACI | 0.0018 |
| 541 | |
| Abatacept vs CTLA-4 186 GSG4S Fc (G4S)4 TACI 541 | 0.0065 |

B220+ cell # per spleen (×10⁶)

| | |
|---|---|
| Fc control vs Abatacept | 0.0092 |
| Fc control vs CTLA-4 186-GSG4S-Fc-(G4S)4 BCMA | 0.022 |
| 406 | |
| Fc control vs CTLA-4 186 GSG4S Fc (G4S)4 TACI 541 | 0.0028 |
| Fc control vs naïve | 0.0162 |
| Abatacept vs CTLA-4 186-GSG4S-Fc-(G4S)4 BCMA | <0.0001 |
| 406 | |
| Abatacept vs CTLA-4 186 GSG4S Fc (G4S)4 TACI 541 | <0.0001 |
| Abatacept vs | 0.0001 |
| CTLA-4 WT ECD 1 GSG4S Fc (G4S)4 TACI 541 | |

Marginal zona (MZ) cell # per spleen (×10⁶)

| | |
|---|---|
| Fc control vs Abatacept | 0.0009 |
| Fc control vs CTLA-4 186-GSG4S-Fc-(G4S)4 BCMA | 0.0312 |
| 406 | |
| Fc control vs CTLA-4 186 GSG4S Fc (G4S)4 TACI 541 | 0.0028 |
| Fc control vs CTLA-4 WT ECD 1 GSG4S Fc (G4S)4 TACI | 0.0385 |
| 541 | |
| Fc control vs naïve | 0.0044 |
| Abatacept vs CTLA-4 186-GSG4S-Fc-(G4S)4 BCMA | <0.0001 |
| 406 | |
| Abatacept vs CTLA-4 186 GSG4S Fc (G4S)4 TACI 541 | <0.0001 |
| Abatacept vs CTLA-4 WT ECD 1 GSG4S Fc (G4S)4 | 0.0057 |
| BCMA 406 | |
| Abatacept vs CTLA-4 WT ECD 1 GSG4S Fc (G4S)4 TACI | <0.0001 |
| 541 | |

Germinal center (GC) B cell # per spleen (×10⁶)

| | |
|---|---|
| Fc control vs CTLA-4 186 GSG4S Fc (G4S)4 TACI 541 | 0.0246 |
| Abatacept vs CTLA-4 WT ECD 1 GSG4S Fc (G4S)4 | 0.0161 |
| BCMA 406 | |

CD4+ T follicular helper (Tfh) cell # per spleen (×10⁶)

| | |
|---|---|
| Fc control vs CTLA-4 186-GSG4S-Fc-(G4S)4 BCMA | 0.0376 |
| 406 | |
| Fc control vs | 0.0083 |
| CTLA-4 186 GSG4S Fc (G4S)4 TACI 541 | |
| Abatacept vs CTLA-4 186-GSG4S-Fc-(G4S)4 BCMA | 0.0268 |
| 406 | |
| Abatacept vs CTLA-4 186 GSG4S Fc (G4S)4 TACI 541 | 0.0057 |

[1002] As shown in FIGS. 13A-13D, multidomain stack molecules containing a CTLA-4 vIgD and a TACI or BCMA vTD were able to reduce the percentage and number per spleen of CD4+ and CD8⁺ Tₑₘ cells as compared to the Fc isotype control and abatacept. Thus, these results show that exemplary tested multidomain stack molecules were at least as effective, and often more effective than, abatacept in their ability to reduce the percentage or numbers of these important effector memory populations in the spleen. Statistical analysis of the exemplary multidomain stack molecules compared to Fc control or abatacept is shown in Table E16.

TABLE E16
Statistical Analysis

| | |
|---|---|
| Comparison | p-value |

CD4+ Tem cells as a % of CD4+ T cells

| | |
|---|---|
| Fc control vs CTLA-4 186-GSG4S-Fc-(G4S)4 BCMA | 0.0035 |
| 406 | |
| Fc control vs CTLA-4 186 GSG4S Fc (G4S)4 TACI | <0.0001 |
| 541 | |
| Abatacept vs CTLA-4 186-GSG4S-Fc-(G4S)4 BCMA | 0.0392 |
| 406 | |
| Abatacept vs CTLA-4 186 GSG4S Fc (G4S)4 TACI | 0.0004 |
| 541 | |

CD8+ Tem cells as a % of CD8+ T cells

| | |
|---|---|
| Fc control vs CTLA-4 186-GSG4S-Fc-(G4S)4 BCMA | 0.0393 |
| 406 | |
| Fc control vs CTLA-4 186 GSG4S Fc (G4S)4 TACI | 0.0042 |
| 541 | |
| Fc control vs naïve | 0.0072 |
| Abatacept vs CTLA-4 186-GSG4S-Fc-(G4S)4 BCMA | 0.0348 |
| 406 | |
| Abatacept vs CTLA-4 186 GSG4S Fc (G4S)4 TACI | 0.0037 |
| 541 | |
| Abatacept vs naïve | 0.0064 |

CD4+ Tem cells # per spleen (×10⁶)

| | |
|---|---|
| Fc control vs CTLA-4 186-GSG4S-Fc-(G4S)4 BCMA | 0.0771 |
| 406 | |
| Fc control vs CTLA-4 186 GSG4S Fc (G4S)4 TACI | 0.0172 |
| 541 | |
| Abatacept vs CTLA-4 186-GSG4S-Fc-(G4S)4 BCMA | 0.0038 |
| 406 | |
| Abatacept vs CTLA-4 186 GSG4S Fc (G4S)4 TACI | 0.0006 |
| 541 | |

CD8+ Tem cells # per spleen (×10⁶)

| | |
|---|---|
| Fc control vs Abatacept | 0.0135 |
| Fc control vs CTLA-4 186 GSG4S Fc (G4S)4 TACI | 0.0866 |
| 541 | |
| Abatacept vs CTLA-4 186-GSG4S-Fc-(G4S)4 BCMA | 0.0002 |
| 406 | |
| Abatacept vs CTLA-4 186 GSG4S Fc (G4S)4 TACI | 0.0002 |
| 541 | |
| Abatacept vs naïve | 0.0028 |

[1003] Together, these results indicate that multidomain stack molecules that inhibit both T cell activity and B cell activity can reduce immune responses and cell subset changes mediated by the T cell-dependent antigen KLH in vivo (i.e. anti-KLH levels in serum and changes in immune cell subsets). These results are consistent with the use of the CTLA-4 and BCMA/TACI multidomain stack proteins as efficacious therapeutics in the treatment of autoimmune and inflammatory diseases in which hyperactive lymphocytes play a role.

### Example 12. Assessment of the Activity of Multi-Specific Constructs in an In Vivo Mouse Lupus Model

[1004] This Example describes the assessment of exemplary CTLA-4 vIgD-Fc molecules, and an exemplary multidomain stack molecule containing TACI vTD with CTLA-4 vIgD domains (described in Example 7 and Table E7) to affect immune responses in an in vivo murine (NZB/NZW)F1 spontaneous lupus model. (NZB×NZW)F1 mice spontaneously develop an autoimmune disease very similar to human SLE and are regarded as one of the best mouse models of this disease. (NZB/NZW)F1 mice have high circulating concentrations of anti-dsDNA antibodies starting around 20 weeks of age, with the first clinical signs of disease detectable around 23 weeks of age. The mice develop hemolytic anemia, proteinuria, and progressive glomerulonephritis mediated by immune complex deposition in the glomerular basement membrane.

[1005] (NZB/NZW)F1 mice were dosed twice weekly via intraperitoneal (IP) injection with 14 mg/kg Fc control, or molar-matched amounts of CTLA-4 vIgD-Fc (186 CTLA-4-Fc) (21 mg/kg), or an exemplary multidomain stack Fc fusion molecule containing TACI vTD and CTLA-4 vIgD (‘CTLA-4 vIgD-Fc-TACI vTD’) (CTLA-4 186 GSG4S Fc (G4S)4 TACI 541) (25 mg/kg). Treatment started at group assignment (Week 22 of age) and continued through the end of the study. The study ended when mice reached Week 43 of age, though some animals were euthanized earlier in the study when they became moribund.

[1006] At various time points between 20 and 40 weeks of age, urine and serum samples were collected. Starting when mice were 20 weeks old, the concentration of protein in the urine from all mice on study was determined weekly with urinalysis test strips (Roche Chemstrip 2 GP, cat. 11895397160). Mean proteinuria scores over time in each treatment group are presented in FIG. 14A, and the mean percent change in body weight (weight loss is associated with advancing disease) in each group in plotted in FIG. 14B. The percent survival of mice in each treatment group is plotted in FIG. 14C. Anti-double stranded (ds) DNA IgG serum titers were measured by Hooke Laboratories, Inc. (Lawrence, Mass.) using their in-house kit, and the results are presented in FIG. 14D. Blood urea nitrogen (BUN) levels increase in these mice with advancing disease. BUN levels at termination of the study (or at sacrifice of mice that succumbed early) for each treatment group are shown in FIG. 14E. Statistical analysis was performed using Uncorrected Dunn's test, ** denotes p=0.0047 and p=0.0065; *** denotes p=0.0004).

[1007] Kidneys were collected at termination from each mouse and analyzed histologically in replicate Periodic acid-Schiff (PAS)-stained sections using the criteria described in Alperovich G et al, 2007. Lupus 16:18-24. All kidney sections were analyzed blind, by a pathologist unaware of the treatments and clinical scores. Glomerular lesions (mesangial expansion, endocapillary proliferation, glomerular deposits, and extracapillary proliferation) and tubular/interstitial lesions (interstitial infiltrates, tubular atrophy, and interstitial fibrosis) were analyzed and graded semi-quantitatively using a scoring system from 0 to 3, with 0=no changes, 1=mild changes, 2=moderate changes, and 3=severe changes. A total histological score for each mouse was calculated as the sum of the individual scores (maximum total score is 21). Kidney scores for total glomerular lesions, total tubular and interstitial lesions, and total kidney lesions are shown in FIG. 14F; as compared to Fc control treated mice, significantly improved renal histopathology was observed in animals treated with CTLA-4 vIgD-Fc (p=0.0068 vs. Fc group for total kidney lesions), or CTLA-4 vIgD-Fc-TACI vTD (p<0.0001 vs. Fc group).

[1008] For FIG. 14G-14H, the right kidney was collected from each mouse at study termination, weighed, dissected transversally, and frozen in a single optimal cutting temperature compound (OCT) block, before sectioning and immunohistochemical (IHC) staining of mouse IgG and mouse complement C3 to assess glomerular IgG and C3 deposition, respectively. The kidney sections were permeabilized with acetone and stained with FITC-conjugated rat monoclonal anti-mouse complement component C3 (Cedarlane) diluted 1:25 in Primary Antibody Diluent (Leica Biosystems), or AF594-conjugated goat anti-mouse IgG (Thermo Fisher Scientific) diluted 1:200 in Primary Antibody Diluent. Glomerular depositions of IgG and C3 were analyzed by a pathologist using a semiquantitative scoring system from 0 to 4, with 0=no deposits, 1=mild mesangial deposition, 2=marked mesangial deposition, 3=mesangial and slight capillary deposition, and 4=intense mesangial and mesangiocapillary deposition, based on the method described in Kelkka et al. (2014) Antioxid Redox Signal. 21:2231-45. As compared to Fc control treated mice, significantly reduced glomerular IgG and C3 were observed in animals treated with 186 CTLA-4 vIgD-Fc (p=0.0084 vs. Fc control group for IgG deposits, and p=0.0007 for C3 deposits), or CTLA-4 186-GSG4S-Fc (G4S)4-TACI 541 (p<0.0001 vs. Fc control group for IgG, and p=0.0053 for C3); data were analyzed for statistically significant differences using Kruskal-Wallis (non-parametric) test followed by uncorrected Dunn's multiple comparison test.

[1009] Results demonstrate that the CTLA-4 vIgD alone or a multi-domain immunomodulatory Fc protein containing a CTLA-4 vIgD and TACI vTD were each able to significantly suppress proteinuria, preserve body weight, enhance overall survival, reduce anti-dsDNA autoantibodies and BUN, reduce IgG and C3 renal deposits, and prevent or improve kidney disease in the (NZB/NZW)F1 mouse model of SLE. Exemplary molecules were also capable of potently reducing B and T cell subsets including plasma cells, follicular T helper cells, germinal center cells, and memory T cells in the spleens and lymph nodes of these mice (data not shown).

### Example 13: Comparative Evaluation of Multi-Specific Constructs in an In Vivo KLH Immunization Model

[1010] This Example describes the assessment of exemplary tested single domain Fc fusion proteins and one multidomain stack protein (described in Example 6, Example 7 and Table E7) to affect immune responses to keyhole limpet hemocyanin (KLH) in vivo in mice. The mouse KLH immunization model can be used to evaluate the effects of the immunomodulatory molecules on antigen-specific responses to the T cell-dependent antigen KLH, following either one or two injections of KLH. Two injections of KLH, each separated by at least 7 days, provides a model that can evaluate both a primary immune response following the 1^{st} KLH injection, and a secondary immune response in the period following the 2^{nd} injection. This Example describes a study that evaluated the activity of multiple BCMA single domain-containing molecules, such as soluble wild-type (WT) or variant BCMA vTDs formatted as Fc fusions, as well as the multidomain stack molecule CTLA4 186-GSG4S-Fc-(G4S)4-TACI 541, in response to two injections of KLH without adjuvant (on Study Day 0 and Day 12). These test articles were compared to administration of molar-matched levels of an Fc isotype control protein or abatacept (WT CTLA-4-Fc). Activity of test articles observed in the mouse KLH model can often predict their immunomodulatory effects in humans.

[1011] To begin the KLH study, 10-week old female C57/BL6NJ mice (The Jackson Laboratories, Sacramento, Calif.) were randomized into 12 groups of 5 mice each. Mice were administered 0.25 mg KLH (EMD Millipore, Cat. 374825-25 MG) via intraperitoneal (IP) injection on Days 0 and 12; the original commercial stock solution of KLH was diluted to the appropriate concentration with Dulbecco's phosphate-buffered saline (DPBS) prior to injection. Mice were dosed with the test articles as outlined in Table E17 via IP injection (dosed on Days 4 and 11). Six mice remained untreated/uninjected as naïve controls (Group 13). Serum was collected on Day 5 (24 hr post-1^{st} dose), Day 12 (24 hr post-2^{nd} dose/pre-KLH boost), and Day 20 to evaluate drug exposure, ADA, and/or anti-KLH antibody levels. One animal in Group 10 received an incomplete dose of test article and was therefore removed from the study.

TABLE E17
Test Article Descriptions and Dose Regimen

| | | | Dose | | | |
|---|---|---|---|---|---|---|
| Group | # of | | Level | | Dose Schedule | Route of |
| # | Mice | Test Article(s) | (mg/dose) | (mg/kg) | (D = Study Day) | Delivery |
| 1 | 5 | Fc control | 0.225 | 11.3 | D4 and D11 | IP |
| 2 | 5 | abatacept | 0.342 | 17.1 | D4 and D11 | IP |
| | | (WT hCTLA-4-Fc) | | | | |
| 3 | 5 | 186 CTLA-4 vIgD-Fc | 0.346 | 17.3 | D4 and D11 | IP |
| 4 | 5 | CTLA4 186-GSG4S- | 0.400 | 20 | D4 and D11 | IP |
| | | Fc-(G4S)4-TACI | | | | |
| | | 541 | | | | |
| 5 | 5 | TACI 30-110-Fc | 0.306 | 15.3 | D4 and D11 | IP |
| 6 | 5 | TACI 13-118-Fc | 0.327 | 16.4 | D4 and D11 | IP |
| 10 | 4 | 406 BCMA-Fc | 0.278 | 13.9 | D4 and D11 | IP |
| 11 | 5 | 381 BCMA-Fc | 0.278 | 13.9 | D4 and D11 | IP |
| 12 | 5 | 411 BCMA-Fc | 0.279 | 13.9 | D4 and D11 | IP |
| 13 | 6 | None (naïve) | N/A | N/A | N/A | N/A |

N/A = not applicable

[1012] On Day 20, all mice were anesthetized with isoflurane and blood collected into serum separator tubes. Mice were sacrificed, and their spleens removed, weighed, and placed into DPBS on ice. Whole blood was centrifuged, and the serum removed and stored at −80° C. until analyzed for anti-KLH levels by enzyme-linked immunosorbent assay (ELISA). Spleens were processed to single cell suspensions, the red blood cells (RBC) lysed using RBC Lysis Buffer (Biolegend, Cat. 420301) according to the manufacturer's instructions, and the cells counted in each sample using dual-fluorescence viability, using acridine orange/propidium iodide (AO/PI) staining (Nexcelom, Cat. CS2-0106-5 mL).

[1013] Each spleen sample was then stained for flow cytometry analysis of immune cell subsets using the following method: 1×10⁶ live cells were placed into a well of two 96-well plates (Coming, Cat. 3797; one plate for a B cell-specific panel and one for a T cell-specific panel), centrifuged at 1500×g for 10 seconds, the supermatant removed, and the cell pellet washed twice with DPBS. The pellets were resuspended in 100 μL of live-dead stain (LIVE/DEAD Fixable Aqua Dead Cell Stain Kit, Life Technologies Corp., 1:1000 dilution in DPBS) and incubated for 10 min in the dark at room temperature. Following two washes with flow cytometry buffer (175 μL each), tumor pellets were resuspended in Mouse BD Fc Block (diluted 1:50 with flow buffer), and incubated in the dark for an additional 5 min at RT. Without any additional washes, 50 μL of a cocktail of the following flow cytometry antibodies (diluted in flow cytometry buffer) were added to each well of cells for the B or T cell panels. For the B cell panel, the following antibodies were combined for the cocktail: anti-mouse CD19 BUV395 (clone 1D3, Becton-Dickinson; 1:100), anti-mouse CD138 BV421 (clone 281-2, BioLegend Inc.; 1:100, final concentration), anti-mouse CD3E BV510 (clone 17A2, BioLegend Inc.; 1:100, final concentration), anti-mouse IgD BV605 (clone 11-26c.2a, BioLegend Inc.; 1:100, final concentration), anti-mouse B220 BV785 (clone RA3-6B2, BioLegend Inc.; 1:100, final concentration), anti-mouse CD95 FITC (clone SA367H8, BioLegend Inc.; 1:100, final concentration), anti-mouse CD23 PerCP Cy5.5 (clone B3B4, BioLegend Inc.; 1:100, final concentration), anti-mouse GL7 PE (clone GL7, BioLegend Inc.; 1:100, final concentration), anti-mouse Gr1 PE Cy7 (clone RB6-8C5, BioLegend Inc.; 1:100, final concentration), anti-mouse CD21 APC (clone 7E9, BioLegend Inc.; 1:100, final concentration), and anti-mouse IgM APC Cy7 (clone RMM-1, BioLegend Inc.; 1:100, final concentration). For the T cell panel, the following antibodies were combined for the cocktail: anti-mouse PD-1 BV421 (clone 29F.1A12, BioLegend Inc.; 1:100, final concentration), anti-mouse CD11b BV510 (clone M1/70, BioLegend Inc.; 1:100, final concentration), anti-mouse CD3E BV605 (clone 145-2C11, BioLegend Inc.; 1:100, final concentration), anti-mouse CD8 BV785 (clone 53-6.7, BioLegend Inc.; 1:100, final concentration), anti-mouse CD44 FITC (clone IM7, BioLegend Inc.; 1:100, final concentration), anti-mouse CD4 PerCP Cy5.5 (clone GK1.5, BioLegend Inc.; 1:100, final concentration), anti-mouse CD62L PE (clone MEL-14, BioLegend Inc.; 1:100, final concentration), anti-mouse CXCR5 PE Dazzle (clone L138D7, BioLegend Inc.; 1:100, final concentration), anti-mouse CD25 PE Cy7 (clone PC61.5, BioLegend Inc.; 1:100, final concentration), and anti-mouse CD45 AF700 (clone 30-F11, BioLegend Inc.; 1:100, final concentration). The cells were incubated with one of the antibody cocktails in the dark, on ice, with gentle mixing for 45 min, followed by two washes with flow cytometry buffer (175 μL per wash). Cell pellets were resuspended in 200 μL flow cytometry buffer and collected on an LSRII flow cytometer. Data were analyzed using FlowJo software version 10.2 (FlowJo LLC, USA) and graphed using GraphPad Prism software (Version 8.1.2). Key cellular subset identification analysis included: total B cells (B220⁺ cells), marginal zone (MZ) B cells (B220⁺, CD19⁺, CD23⁻, CD21^{high}, IgM^{high} cells), germinal center (GC) B cells (B220⁺, CD19⁺, GL7⁺, CD95⁺ cells), T follicular helper (Tfh) cells (CD45⁺, CD3⁺, CD4⁺, PD-1⁺, CD185⁺ cells), CD4⁺ T effector memory (Tₑₘ) cells (CD45⁺, CD3+, CD4+, CD44+, CD62L-cells), and CD8⁺ Tₑₘ cells (CD45⁺, CD3⁺, CD8⁺, CD44⁺, CD62L⁻ cells).

[1014] Statistically significant differences (p<0.05) between groups were determined by one-way analysis of variance (ANOVA) and uncorrected Fisher's Least Significant Difference (LSD) multiple comparison test using GraphPad Prism software (Version 8.1.2).

[1015] To determine the extent to which the test articles inhibited KLH-mediated antibody immune responses compared to an Fc isotype control (SEQ ID NO:589), serum samples were evaluated for concentrations of anti-KLH antibodies in two ELISA assays. The ELISA assays measured either IgM- or IgG1-specific anti-KLH levels in the serum. Mouse serum samples at numerous dilutions were incubated in plates coated with KLH, followed by washes and detection with 1:2000 goat anti-mouse IgG1:HRP or 1:5000 goat anti-mouse IgM:HRP. Color development was achieved using a TMB Substrate Kit (SeraCare) and the ELISA plates analyzed on a plate reader (SpectraMax® iD3 Microplate Reader, Molecular Devices LLC). There was no standard curve for the assay, thus optical density (OD) was used to compare the levels of anti-KLH antibodies; the higher the OD, the greater the levels of anti-KLH antibodies in the serum sample. For anti-KLH IgM OD levels, data are presented in FIG. 18A (primary response), FIG. 18B (secondary response) and statistical analysis by 1-way ANOVA and uncorrected Fisher's LSD multiple comparison test presented in Table E18 and Table E19, respectively. Anti-KLH IgG1 OD levels are presented in FIG. 18C (primary response), FIG. 18D (secondary response) and statistical analysis by 1-way ANOVA and uncorrected Fisher's LSD multiple comparison test presented in Tables E18-E21. Results demonstrate that each of the test articles were able to significantly reduce anti-KLH IgM levels in serum during the primary immune response compared to Fc control treatment, with CTLA-4 186 GSG4S Fc (G4S)4 TACI 541 (SEQ ID NO: 610) demonstrating the largest reductions amongst all test articles, and abatacept treatment having the most modest effect (FIG. 18A). For the secondary response on Day 20, measured 9 days after the 2^{nd} and last dose of test article, all test articles except TACI 13-118-Fc and 406 BCMA-Fc induced significant reductions in anti-KLH IgM levels, with CTLA-4 186 GSG4S Fc (G4S)4 TACI 541 (SEQ ID NO: 610) demonstrating the largest reductions (FIG. 18B). Each of the test articles were also able to significantly reduce anti-KLH IgG1 levels during the primary immune response compared to Fc control, with CTLA-4 186 GSG4S Fc (G4S)4 TACI 541 (SEQ ID NO: 610) again demonstrating the greatest reductions (FIG. 18C). For the secondary response to KLH, all test articles except TACI 30-110-Fc, TACI 13-118-Fc, and 411 BCMA-Fc significantly reduced levels of anti KLH IgG1 (FIG. 18D). These results indicate that most of the molecules containing the BCMA vTD were efficacious at reducing the T cell-dependent antibody immune response to KLH, with CTLA-4 186 GSG4S Fc (G4S)4 TACI 541 (SEQ ID NO: 610), and 381 BMCA-Fc exhibiting the most significant effects in this mouse immunization model.

TABLE E18
Statistical Analysis of anti-KLH IgM OD levels (primary
response; FIG. 18A)

| Comparison | p-value | Significant? |
|---|---|---|
| Fc Control vs. abatacept | 0.0167 | Yes |
| Fc Control vs. 186 CTLA-4 vIgD-Fc | <0.0001 | Yes |
| Fc Control vs. CTLA4 186-GSG4S- | <0.0001 | Yes |
| Fc-(G4S)4-TACI 541 | | |
| Fc Control vs. TACI 30-110-Fc | <0.0001 | Yes |
| Fc Control vs. TACI 13-118-Fc | <0.0001 | Yes |
| Fc Control vs. 406 BCMA-Fc | <0.0001 | Yes |
| Fc Control vs. 381 BCMA-Fc | <0.0001 | Yes |
| Fc Control vs. 411 BCMA-Fc | <0.0001 | Yes |
| Fc Control vs. Naive | <0.0001 | Yes |

TABLE E19
Statistical Analysis of anti-KLH IgM OD levels (secondary
response; FIG. 18B)

| Comparison | p-value | Significant? |
|---|---|---|
| Fc Control vs. abatacept | <0.0001 | Yes |
| Fc Control vs. 186 CTLA-4 vIgD-Fc | <0.0001 | Yes |
| Fc Control vs. CTLA4 186-GSG4S- | <0.0001 | Yes |
| Fc-(G4S)4-TACI 541 | | |
| Fc Control vs. TACI 30-110-Fc | 0.0283 | Yes |
| Fc Control vs. TACI 13-118-Fc | 0.4653 | No |
| Fc Control vs. 406 BCMA-Fc | 0.0971 | No |
| Fc Control vs. 381 BCMA-Fc | 0.0032 | Yes |
| Fc Control vs. 411 BCMA-Fc | 0.0218 | Yes |
| Fc Control vs. Naive | <0.0001 | Yes |

TABLE E20
Statistical Analysis of anti-KLH IgG1 OD levels (primary
response; FIG. 18C)

| Comparison | p-value | Significant? |
|---|---|---|
| Fc Control vs. abatacept | 0.0457 | Yes |
| Fc Control vs. 186 CTLA-4 vIgD-Fc | 0.0057 | Yes |
| Fc Control vs. CTLA4 186-GSG4S- | <0.0001 | Yes |
| Fc-(G4S)4-TACI 541 | | |
| Fc Control vs. TACI 30-110-Fc | 0.0218 | Yes |
| Fc Control vs. TACI 13-118-Fc | 0.0093 | Yes |
| Fc Control vs. 406 BCMA-Fc | 0.0039 | Yes |
| Fc Control vs. 381 BCMA-Fc | 0.0006 | Yes |
| Fc Control vs. 411 BCMA-Fc | 0.0002 | Yes |
| Fc Control vs. Naive | <0.0001 | Yes |

TABLE E21
Statistical Analysis of anti-KLH IgG1 OD levels (secondary
response; FIG. 18D)

| Comparison | p-value | Significant? |
|---|---|---|
| Fc Control vs. abatacept | <0.0001 | Yes |
| Fc Control vs. 186 CTLA-4 vIgD-Fc | <0.0001 | Yes |
| Fc Control vs. CTLA4 186-GSG4S- | <0.0001 | Yes |
| Fc-(G4S)4-TACI 541 | | |
| Fc Control vs. TACI 30-110-Fc | 0.5367 | No |
| Fc Control vs. TACI 13-118-Fc | 0.1477 | No |
| Fc Control vs. 406 BCMA-Fc | 0.0397 | Yes |
| Fc Control vs. 381 BCMA-Fc | 0.0286 | Yes |
| Fc Control vs. 411 BCMA-Fc | 0.8374 | No |
| Fc Control vs. Naive | <0.0001 | Yes |

[1016] As shown in FIGS. 19A and 191B, mice treated with all test articles except TACI 30-110-1Fc or TACI 13-118-1Fc had significantly smaller spleens as assessed by weight and cell number, respectively, at the end of the study (Day 20) compared to Fc control-treated mice (Table E22), and mice treated with CTLA-4 186 GSG4S Fc (G4S)4 TACI 541 (SEQ ID NO: 610) had the smallest spleens of all the treatment groups. Mice treated with each of the test articles except 186 CTLA-4 vIgD-Fc also had significantly fewer spleen cells than the Fc control group, and the mice treated with CTLA-4 186 GSG4S Fc (G4S)4 TACI 541 (SEQ ID NO: 610) had the lowest number of splenocytes among all treatment groups. The smaller spleens are indicative of reductions in lymphocytes, which can have immunomodulatory effects on the pathogenesis of autoimmune and inflammatory diseases associated with heightened immune responses, particularly those driven by B and/or T cells. Statistical analyses of spleen weights and total cell numbers are shown in Table E22 and Table E23, respectively.

TABLE E22
Statistical Comparisons Across All Treatment Groups for Spleen Weights (FIG. 19A):

| | | | | CTLA4 | | | | | |
|---|---|---|---|---|---|---|---|---|---|
| | | | | 186- | | | | | |
| | | | | GSG4S- | | | | | |
| | | | 186 | Fc- | | | | | |
| | | | CTLA-4 | (G4S)4- | TACI | TACI | | | |
| Treatment | Fc | | vIgD- | TACI | 30- | 13- | 406 | 381 | 411 |
| Group | control | abatacept | Fc | 541 | 110-Fc | 118-Fc | BCMA-Fc | BCMA-Fc | BCMA-Fc |
| abatacept | 0.0084 | | | | | | | | |
| 186 CTLA-4 | 0.0056 | ns | | | | | | | |
| vIgD-Fc | | | | | | | | | |
| CTLA4 186- | <0.0001 | 0.0033 | 0.0124 | | | | | | |
| GSG4S-Fc- | | | | | | | | | |
| (G4S)4- | | | | | | | | | |
| TACI 541 | | | | | | | | | |
| TACI 30-110-Fc | ns | 0.0228 | 0.0148 | <0.0001 | | | | | |
| TACI 13-118-Fc | ns | 0.0415 | 0.0267 | <0.0001 | ns | | | | |
| 406 BCMA-Fc | 0.0253 | ns | ns | 0.0009 | ns | ns | | | |
| 381 BCMA-Fc | 0.0101 | ns | ns | 0.0027 | 0.0269 | 0.0483 | ns | | |
| 411 BCMA-Fc | 0.0022 | ns | ns | 0.0122 | 0.0067 | 0.013 | ns | ns | |
| Naive | 0.041 | ns | ns | 0.0002 | ns | ns | ns | ns | ns |

TABLE E23
Statistical Comparisons Across All Treatment Groups for Splenic Cell Numbers (FIG. 19B)

| | | | | CTLA4 | | | | | |
|---|---|---|---|---|---|---|---|---|---|
| | | | | 186- | | | | | |
| | | | | GSG4S- | | | | | |
| | | | 186 | Fc- | TACI | TACI | 406 | 381 | 411 |
| Treatment | Fc | | CTLA-4 | (G4S)4- | 30-110- | 13-118- | BCMA - | BCMA- | BCMA- |
| Group | control | abatacept | vIgD-Fc | TACI 541 | Fc | Fc | Fc | Fc | Fc |
| abatacept | 0.0168 | | | | | | | | |
| 186 CTLA-4 | ns | ns | | | | | | | |
| vIgD-Fc | | | | | | | | | |
| CTLA4 186- | <0.0001 | <0.0001 | <0.0001 | | | | | | |
| GSG4S- | | | | | | | | | |
| Fc-(G4S)4- | | | | | | | | | |
| TACI541 | | | | | | | | | |
| TACI 30-110-Fc | 0.0022 | ns | ns | <0.0001 | | | | | |
| TACI 13-118-Fc | 0.0079 | ns | ns | <0.0001 | ns | | | | |
| 406 BCMA-Fc | <0.0001 | ns | 0.0174 | 0.0006 | ns | ns | | | |
| 381 BCMA-Fc | <0.0001 | 0.0011 | 0.0003 | 0.017 | 0.0094 | 0.0027 | ns | | |
| 411 BCMA-Fc | <0.0001 | 0.0024 | 0.0005 | 0.009 | 0.0176 | 0.0054 | ns | ns | |
| Naive | <0.0001 | 0.0112 | 0.0025 | 0.0009 | ns | 0.0241 | ns | ns | ns |

[1017] Of particular importance to the pathogenesis of autoimmune and inflammatory diseases are cell types that promote B cell survival and differentiation, antibody production, and T cell effector memory. These cell types include, but are not limited to, the following: total B cells, marginal zone (MZ) B cells, germinal center (GC) B cells, T follicular helper (Tfh) cells, and CD4⁺ and CD 8⁺ T effector memory (Tₑₘ) cells. Therapeutics whose mechanisms of action include reducing these cell types would be anticipated to be efficacious in the treatment of numerous autoantibody-mediated diseases. Treatment with CTLA-4 186 GSG4S Fc (G4S)4 TACI 541 (SEQ ID NO: 610), or any of the BCMA-Fc test articles substantially reduced the numbers of multiple splenic B cell subsets compared to the remaining treatment groups, including impacts on transitional-2 (B220⁺ CD 19⁺ CD23⁺ CD2^{high} IgM^{high}), follicular (B220⁺ CD 19⁺ CD23⁺ CD21⁺ IgM⁺), marginal zone (B220⁺ CD 19⁺ CD23^{neg} CD^{high} IgM^{high} germinal centre (B220⁺ CD 19⁺ GL7⁺ CD95⁺), and plasma cells (B220^{low} CD19⁺ CD138^{high}) (FIG. 20 and FIG. 21). These BCMA vTD-containing single or TACI vTD- or BCMA vTD-containing multi-domain molecules were as effective or better than abatacept or the two WT TACI-Fc molecules (TACI 13-188-Fc and TACI 30-110-Fc) in their ability to reduce the percentage (not shown) or numbers of these populations that are important in B cell survival and differentiation and antibody production. Statistical analyses from flow cytometry data of Day 20 splenocytes are shown in Tables E24-E42.

[1018] The splenic CD3+, CD4+, or CD8+ T cell populations were largely unaffected by the BCMA vTD-containing test articles (Groups 7-12), though treatment of the mice with CTLA-4 186 GSG4S Fc (G4S)4 TACI 541 (SEQ ID NO: 610) (Group 4) did reduce the numbers of these T cell populations compared to the Fc control group (FIG. 22A-22C). CTLA-4 186 GSG4S Fc (G4S)4 TACI 541 (SEQ ID NO: 610) also reduced Tcm and Tem memory T cells compared to the Fc control group, while the TACI or BCMA single domain test articles did not (FIG. 23). As compared to the Fc control, all of the test articles reduced the numbers of follicular helper T cells (CD45⁺, CD3⁺, CD4⁺, PD-1⁺, CD185⁺), which interact with B cells in the germinal center and are important contributors to T cell-dependent antibody responses (FIG. 22D).

TABLE E24
Statistical Analysis of Splenic B Cell Subsets—Cell Numbers vs. Fc Control Group (FIG. 20)

| | | | | Marginal | | |
|---|---|---|---|---|---|---|
| | T1 B | T2 B | Follic B | Zone B | GC B | Plasma |
| Comparison | cells | cells | cells | cells | cells | Cells |
| Fc Control vs. abatacept | 0.4773 | 0.0760 | 0.0009 | 0.0022 | <0.0001 | 0.0014 |
| Fc Control vs. 186 CTLA-4 vIgD-Fc | 0.5970 | 0.1130 | 0.0189 | 0.0003 | <0.0001 | 0.0580 |
| Fc Control vs. CTLA4 186- | 0.0345 | <0.0001 | <0.0001 | <0.0001 | <0.0001 | <0.0001 |
| GSG4S-Fc-(G4S)4-TACI 541 | | | | | | |
| Fc Control vs. TACI 30-110-Fc | 0.2738 | 0.4820 | <0.0001 | <0.0001 | 0.0152 | <0.0001 |
| Fc Control vs. TACI 13-118-Fc | 0.5942 | 0.0045 | <0.0001 | <0.0001 | 0.0115 | 0.0012 |
| Fc Control vs. 406 BCMA-Fc | 0.9686 | <0.0001 | <0.0001 | <0.0001 | 0.0030 | <0.0001 |
| Fc Control vs. 381 BCMA-Fc | 0.5743 | <0.0001 | <0.0001 | <0.0001 | <0.0001 | <0.0001 |
| Fc Control vs. 411 BCMA-Fc | 0.4039 | <0.0001 | <0.0001 | <0.0001 | 0.0004 | <0.0001 |
| Fc Control vs. Naive | 0.2333 | 0.0241 | | <0.0001 | <0.0001 | <0.0001 |

TABLE E25
Statistical Analysis of Splenic T Cell Subsets-Cell Numbers
vs. Fc Control Group (FIG. 22A-22D)

| | CD3+ T | CD8+ T | CD4+ T | CD4+ Tfh |
|---|---|---|---|---|
| Comparison | cells | cells | cells | cells |
| Fc Control vs. abatacept | 0.1393 | 0.2757 | 0.0800 | <0.0001 |
| Fc Control vs. 186 | 0.4956 | 0.7235 | 0.2681 | <0.0001 |
| CTLA-4 vIgD-Fc | | | | |
| Fc Control vs. | 0.0001 | 0.0034 | <0.0001 | <0.0001 |
| CTLA4 186-GSG4S- | | | | |
| Fc-(G4S)4-TACI 541 | | | | |
| Fc Control vs. TACI | 0.7623 | 0.5177 | 0.2474 | <0.0001 |
| 30-110-Fc | | | | |
| Fc Control vs. TACI | 0.7210 | 0.6151 | 0.2739 | 0.0001 |
| 13-118-Fc | | | | |
| Fc Control vs. 406 | 0.8262 | 0.2192 | 0.4770 | <0.0001 |
| BCMA-Fc | | | | |
| Fc Control vs. 381 | 0.2153 | 0.7029 | 0.0565 | <0.0001 |
| BCMA-Fc | | | | |
| Fc Control vs. 411 | 0.2095 | 0.8683 | 0.0126 | <0.0001 |
| BCMA-Fc | | | | |
| Fc Control vs. Naive | 0.0038 | 0.0086 | 0.0029 | <0.0001 |

TABLE E26
Statistical Analysis of Splenic T Cell Subsets—Cell Numbers vs. Fc Control Group (FIG. 27)

| | Naive | CD4+ | CD4+ | Naive | CD8+ | CD8+ |
|---|---|---|---|---|---|---|
| | CD4+ | Tcm | Tem | CD8+ | Tcm | Tem |
| Comparison | T cells | cells | cells | T cells | cells | cells |
| Fc Control vs. abatacept | 0.5081 | 0.0047 | <0.0001 | 0.6246 | 0.1115 | 0.3078 |
| Fc Control vs. 186 CTLA-4 vIgD-Fc | 0.9715 | 0.0017 | <0.0001 | 0.9728 | 0.3248 | 0.9740 |
| Fc Control vs. CTLA4 186- | 0.0017 | <0.0001 | <0.0001 | 0.0109 | 0.0013 | 0.0391 |
| GSG4S-Fc-(G4S)4-TACI 541 | | | | | | |
| Fc Control vs. TACI 30-110-Fc | 0.4484 | 0.0695 | 0.0088 | 0.9952 | 0.2531 | 0.1411 |
| Fc Control vs. TACI 13-118-Fc | 0.4336 | 0.1831 | 0.0355 | 0.8153 | 0.3456 | 0.0729 |
| Fc Control vs. 406 BCMA-Fc | 0.7834 | 0.0995 | 0.0236 | 0.4410 | 0.0847 | 0.3897 |
| Fc Control vs. 381 BCMA-Fc | 0.2029 | 0.0003 | 0.0002 | 0.8184 | 0.6104 | 0.6897 |
| Fc Control vs. 411 BCMA-Fc | 0.0691 | 0.0002 | <0.0001 | 0.8360 | 0.6895 | 0.5270 |
| Fc Control vs. Naive | 0.0433 | 0.0516 | <0.0001 | 0.0782 | 0.0016 | 0.0166 |

TABLE E27
Statistical Comparisons Across All Treatment Groups for Numbers of T1 B Cells

| | | | | CTLA4 | | | | | |
|---|---|---|---|---|---|---|---|---|---|
| | | | | 186- | | | | | |
| | | | | GSG4S- | | | | | |
| | | | 186 | Fc- | | | | | |
| Treatment | Fc | | CTLA-4 | (G4S)4- | TACI | TACI | 406 | 381 | 411 |
| Group | control | abatacept | vIgD-Fc | TACI 541 | 30-110-Fc | 13-118-Fc | BCMA-Fc | BCMA-Fc | BCMA-Fc |
| abatacept | ns | | | | | | | | |
| 186 CTLA-4 | ns | ns | | | | | | | |
| vIgD-Fc | | | | | | | | | |
| CTLA4 186- | 0.0417 | ns | 0.0164 | | | | | | |
| GSG4S-Fc- | | | | | | | | | |
| (G4S)4-TACI 541 | | | | | | | | | |
| TACI 30-110-Fc | ns | ns | ns | ns | | | | | |
| TACI 13-118-Fc | ns | ns | ns | ns | ns | | | | |
| 406 BCMA-Fc | ns | ns | ns | ns | ns | ns | | | |
| 381 BCMA-Fc | ns | ns | ns | ns | ns | ns | ns | | |
| 411 BCMA-Fc | ns | ns | ns | ns | ns | ns | ns | ns | |
| Naive | ns | ns | ns | ns | ns | ns | ns | ns | ns |

TABLE E28
Statistical Comparisons Across All Treatment Groups for Numbers of T2 B cells

| | | | | CTLA4 | | | | | |
|---|---|---|---|---|---|---|---|---|---|
| | | | | 186- | | | | | |
| | | | 186 | GSG4S- | | | | | |
| Treatment | Fc | | CTLA-4 | Fc-(G4S)4- | TACI | TACI | 406 | 381 | 411 |
| Group | control | abatacept | vIgD-Fc | TACI 541 | 30-110-Fc | 13-118-Fc | BCMA-Fc | BCMA-Fc | BCMA-Fc |
| abatacept | ns | | | | | | | | |
| 186 CTLA-4 | ns | ns | | | | | | | |
| vIgD-Fc | | | | | | | | | |
| CTLA4 186- | <0.0001 | <0.0001 | <0.0001 | | | | | | |
| GSG4S-Fc- | | | | | | | | | |
| (G4S)4-TACI | | | | | | | | | |
| 541 | | | | | | | | | |
| TACI 30-110-Fc | ns | 0.0142 | 0.0257 | <0.0001 | | | | | |
| TACI 13-118-Fc | 0.0042 | <0.0001 | <0.0001 | <0.0001 | 0.0268 | | | | |
| 406 BCMA-Fc | <0.0001 | <0.0001 | <0.0001 | ns | <0.0001 | <0.0001 | | | |
| 381 BCMA-Fc | <0.0001 | <0.0001 | <0.0001 | ns | <0.0001 | <0.0001 | ns | | |
| 411 BCMA-Fc | <0.0001 | 0.0002 | 0.0002 | ns | <0.0001 | <0.0001 | ns | ns | |
| Naive | 0.0231 | ns | ns | <0.0001 | 0.0033 | <0.0001 | 0.0001 | <0.0001 | 0.0003 |

TABLE E29
Statistical Comparisons Across All Treatment Groups for Numbers of Follicular B Cells

| | | | | CTLA4 186- | | | | | |
|---|---|---|---|---|---|---|---|---|---|
| | | | 186 | GSG4S-Fc- | | | | | |
| Treatment | Fc | | CTLA-4 | (G4S)4- | TACI | TACI | 406 | 381 | 411 |
| Group | control | abatacept | vIgD-Fc | TACI 541 | 30-110-Fc | 13-118-Fc | BCMA-Fc | BCMA-Fc | BCMA-Fc |
| abatacept | 0.0008 | | | | | | | | |
| 186 CTLA-4 | 0.0185 | ns | | | | | | | |
| vIgD-Fc | | | | | | | | | |
| CTLA4 186- | <0.0001 | <0.0001 | <0.0001 | | | | | | |
| GSG4S-Fc- | | | | | | | | | |
| (G4S)4- | | | | | | | | | |
| TACI 541 | | | | | | | | | |
| TACI 30-110-Fc | <0.0001 | <0.0001 | <0.0001 | <0.0001 | | | | | |
| TACI 13-118-Fc | <0.0001 | 0.0014 | 0.0001 | <0.0001 | ns | | | | |
| 406 BCMA-Fc | <0.0001 | <0.0001 | <0.0001 | ns | 0.0002 | <0.0001 | | | |
| 381 BCMA-Fc | <0.0001 | <0.0001 | <0.0001 | ns | <0.0001 | <0.0001 | ns | | |
| 411 BCMA-Fc | <0.0001 | <0.0001 | <0.0001 | ns | 0.0002 | <0.0001 | ns | ns | |
| Naive | <0.0001 | 0.0002 | <0.0001 | <0.0001 | ns | ns | <0.0001 | <0.0001 | <0.0001 |

TABLE E30
Statistical Comparisons Across All Treatment Groups for Numbers of Marginal Zone B Cells

| | | | | CTLA4 186- | | | | | |
|---|---|---|---|---|---|---|---|---|---|
| | | | 186 | GSG4S- | | | | | |
| Treatment | Fc | | CTLA-4 | Fc-(G4S)4- | TACI | TACI | 406 | 381 | 411 |
| Group | control | abatacept | vIgD-Fc | TACI 541 | 30-110-Fc | 13-118-Fc | BCMA-Fc | BCMA-Fc | BCMA-Fc |
| abatacept | 0.0021 | | | | | | | | |
| 186 CTLA-4 | 0.0003 | ns | | | | | | | |
| vIgD-Fc | | | | | | | | | |
| CTLA4 186- | <0.0001 | <0.0001 | <0.0001 | | | | | | |
| GSG4S-Fc- | | | | | | | | | |
| (G4S)4-TACI | | | | | | | | | |
| 541 | | | | | | | | | |
| TACI 30-110-Fc | <0.0001 | <0.0001 | <0.0001 | ns | | | | | |
| TACI 13-118-Fc | <0.0001 | <0.0001 | <0.0001 | ns | ns | | | | |
| 406 BCMA-Fc | <0.0001 | <0.0001 | <0.0001 | ns | ns | ns | | | |
| 381 BCMA-Fc | <0.0001 | <0.0001 | <0.0001 | ns | ns | ns | ns | | |
| 411 BCMA-Fc | <0.0001 | <0.0001 | <0.0001 | ns | ns | ns | ns | ns | |
| Naive | <0.0001 | ns | ns | <0.0001 | <0.0001 | <0.0001 | <0.0001 | <0.0001 | <0.0001 |

TABLE E31
Statistical Comparisons Across All Treatment Groups for Numbers of Germinal Centre B Cells

| | | | | CTLA4 186- | | | | | |
|---|---|---|---|---|---|---|---|---|---|
| | | | 186 | GSG4S-Fc- | | | | | |
| Treatment | Fc | | CTLA-4 | (G4S)4- | TACI | TACI | 406 | 381 | 411 |
| Group | control | abatacept | vIgD-Fc | TACI 541 | 30-110-Fc | 13-118-Fc | BCMA-Fc | BCMA-Fc | BCMA-Fc |
| abatacept | <0.0001 | | | | | | | | |
| 186 CTLA-4 | <0.0001 | ns | | | | | | | |
| vIgD-Fc | | | | | | | | | |
| CTLA4 186- | <0.0001 | ns | ns | | | | | | |
| GSG4S-Fc- | | | | | | | | | |
| (G4S)4- | | | | | | | | | |
| TACI 541 | | | | | | | | | |
| TACI 30-110-Fc | 0.0182 | <0.0001 | 0.0002 | <0.0001 | | | | | |
| TACI 13-118-Fc | 0.0139 | <0.0001 | 0.0002 | <0.0001 | ns | | | | |
| 406 BCMA-Fc | 0.0003 | 0.0058 | 0.0105 | 0.004 | ns | ns | | | |
| 381 BCMA-Fc | 0.0001 | 0.0113 | 0.0192 | 0.0079 | ns | ns | ns | | |
| 411 BCMA-Fc | 0.0006 | 0.003 | 0.0058 | 0.002 | ns | ns | ns | ns | |
| Naive | <0.0001 | ns | ns | ns | <0.0001 | <0.0001 | 0.0063 | 0.0127 | 0.0032 |

TABLE E32
Statistical Comparisons Across All Treatment Groups for Numbers of Plasma Cells

| | | | 186 | CTLA4 186- | | | | | |
|---|---|---|---|---|---|---|---|---|---|
| | | | CTLA- | GSG4S-Fc- | TACI | TACI | 406 | 381 | 411 |
| Treatment | Fc | | 4vIgD- | (G4S)4- | 30-110- | 13-118- | BCMA- | BCMA- | BCMA- |
| Group | control | abatacept | Fc | TACI 541 | Fc | Fc | Fc | Fc | Fc |
| abatacept | 0.0019 | | | | | | | | |
| 186 CTLA-4 | ns | ns | | | | | | | |
| vIgD-Fc | | | | | | | | | |
| CTLA4 186- | <0.0001 | <0.0001 | <0.0001 | | | | | | |
| GSG4S-Fc- | | | | | | | | | |
| (G4S)4- | | | | | | | | | |
| TACI 541 | | | | | | | | | |
| TACI 30-110- | <0.0001 | ns | 0.0392 | <0.0001 | | | | | |
| Fc | | | | | | | | | |
| TACI 13-118- | 0.0016 | ns | ns | <0.0001 | ns | | | | |
| Fc | | | | | | | | | |
| 406 BCMA- | <0.0001 | 0.0237 | 0.0013 | 0.0052 | ns | 0.0268 | | | |
| Fc | | | | | | | | | |
| 381 BCMA- | <0.0001 | 0.0002 | <0.0001 | ns | 0.004 | 0.0003 | ns | | |
| Fc | | | | | | | | | |
| 411 BCMA- | <0.0001 | 0.0011 | <0.0001 | ns | 0.0151 | 0.0012 | ns | ns | |
| Fc | | | | | | | | | |
| Naive | <0.0001 | 0.0184 | 0.0009 | 0.0036 | ns | 0.0211 | ns | ns | ns |

TABLE E33
Statistical Comparisons Across All Treatment Groups for Numbers of CD3+ T Cells

| | | | 186 | CTLA4 186- | | | | | |
|---|---|---|---|---|---|---|---|---|---|
| | | | CTLA- | GSG4S-Fc- | TACI | TACI | 406 | 381 | 411 |
| Treatment | Fc | | 4vIgD- | (G4S)4- | 30-110- | 13-118- | BCMA- | BCMA- | BCMA- |
| Group | control | abatacept | Fc | TACI 541 | Fc | Fc | Fc | Fc | Fc |
| abatacept | ns | | | | | | | | |
| 186 CTLA-4 | ns | ns | | | | | | | |
| vIgD-Fc | | | | | | | | | |
| CTLA4 186- | 0.0001 | 0.0113 | 0.0023 | | | | | | |
| GSG4S-Fc- | | | | | | | | | |
| (G4S)4- | | | | | | | | | |
| TACI 541 | | | | | | | | | |
| TACI 30-110- | ns | ns | ns | 0.0004 | | | | | |
| Fc | | | | | | | | | |
| TACI 13-118- | ns | ns | ns | 0.0004 | ns | | | | |
| Fc | | | | | | | | | |
| 406 BCMA- | ns | ns | ns | 0.0001 | ns | ns | | | |
| Fc | | | | | | | | | |
| 381 BCMA- | ns | ns | ns | 0.0059 | ns | ns | ns | | |
| Fc | | | | | | | | | |
| 411 BCMA- | ns | ns | ns | 0.0062 | ns | ns | ns | ns | |
| Fc | | | | | | | | | |
| Naive | 0.0038 | ns | 0.0374 | ns | 0.0089 | 0.0104 | 0.0034 | ns | ns |

TABLE E34
Statistical Comparisons Across All Treatment Groups for Numbers of CD4+ T Cells

| | | | 186 | CTLA4 186- | | | | | |
|---|---|---|---|---|---|---|---|---|---|
| | | | CTLA- | GSG4S-Fc- | TACI | TACI | 406 | 381 | 411 |
| Treatment | Fc | | 4vIgD- | (G4S)4- | 30-110- | 13-118- | BCMA- | BCMA- | BCMA- |
| Group | control | abatacept | Fc | TACI 541 | Fc | Fc | Fc | Fc | Fc |
| abatacept | ns | | | | | | | | |
| 186 CTLA-4 | ns | ns | | | | | | | |
| vIgD-Fc | | | | | | | | | |
| CTLA4 186- | <0.0001 | 0.0049 | 0.0016 | | | | | | |
| GSG4S-Fc- | | | | | | | | | |
| (G4S)4- | | | | | | | | | |
| TACI 541 | | | | | | | | | |
| TACI 30-110- | ns | ns | ns | 0.0008 | | | | | |
| Fc | | | | | | | | | |
| TACI 13-118- | ns | ns | ns | 0.0007 | ns | | | | |
| Fc | | | | | | | | | |
| 406 BCMA- | ns | ns | ns | 0.0005 | ns | ns | | | |
| Fc | | | | | | | | | |
| 381 BCMA- | ns | ns | ns | 0.0076 | ns | ns | ns | | |
| Fc | | | | | | | | | |
| 411 BCMA- | 0.0126 | ns | ns | 0.0367 | ns | ns | ns | ns | |
| Fc | | | | | | | | | |
| Naive | 0.0029 | ns | ns | ns | 0.062 | ns | 0.033 | ns | ns |

TABLE E35
Statistical Comparisons Across All Treatment Groups for Numbers of CD8+ T Cells

| | | | 186 | CTLA4 186- | | | | | |
|---|---|---|---|---|---|---|---|---|---|
| | | | CTLA- | GSG4S-Fc- | TACI | TACI | 406 | 381 | 411 |
| Treatment | Fc | | 4vIgD- | (G4S)4- | 30-110- | 13-118- | BCMA- | BCMA- | BCMA- |
| Group | control | abatacept | Fc | TACI 541 | Fc | Fc | Fc | Fc | Fc |
| abatacept | ns | | | | | | | | |
| 186 CTLA-4 | ns | ns | | | | | | | |
| vIgD-Fc | | | | | | | | | |
| CTLA4 186- | 0.011 | ns | 0.0337 | | | | | | |
| GSG4S-Fc- | | | | | | | | | |
| (G4S)4- | | | | | | | | | |
| TACI 541 | | | | | | | | | |
| TACI 30-110- | ns | ns | ns | 0.0024 | | | | | |
| Fc | | | | | | | | | |
| TACI 13-118- | ns | ns | ns | 0.0034 | ns | | | | |
| Fc | | | | | | | | | |
| 406 BCMA- | ns | ns | ns | 0.0184 | ns | ns | | | |
| Fc | | | | | | | | | |
| 381 BCMA- | ns | ns | ns | 0.025 | ns | ns | ns | | |
| Fc | | | | | | | | | |
| 411 BCMA- | ns | ns | ns | 0.0076 | ns | ns | ns | ns | |
| Fc | | | | | | | | | |
| Naive | 0.023 | ns | ns | ns | 0.0051 | 0.0072 | 0.0377 | 0.0507 | 0.0159 |

TABLE E36
Statistical Comparisons Across All Treatment Groups for Numbers of Follicular Helper T Cells

| | | | 186 | CTLA4 186- | | | | | |
|---|---|---|---|---|---|---|---|---|---|
| | | | CTLA- | GSG4S-Fc- | TACI | TACI | 406 | 381 | 411 |
| Treatment | Fc | | 4vIgD- | (G4S)4- | 30-110- | 13-118- | BCMA- | BCMA- | BCMA- |
| Group | control | abatacept | Fc | TACI 541 | Fc | Fc | Fc | Fc | Fc |
| abatacept | <0.0001 | | | | | | | | |
| 186 CTLA-4 | <0.0001 | ns | | | | | | | |
| vIgD-Fc | | | | | | | | | |
| CTLA4 186- | <0.0001 | ns | ns | | | | | | |
| GSG4S-Fc- | | | | | | | | | |
| (G4S)4- | | | | | | | | | |
| TACI 541 | | | | | | | | | |
| TACI 30-110- | <0.0001 | ns | 0.0242 | 0.0047 | | | | | |
| Fc | | | | | | | | | |
| TACI 13-118- | 0.0001 | 0.0193 | 0.0026 | 0.0003 | ns | | | | |
| Fc | | | | | | | | | |
| 406 BCMA- | <0.0001 | ns | ns | 0.0314 | ns | ns | | | |
| Fc | | | | | | | | | |
| 381 BCMA- | <0.0001 | ns | ns | ns | ns | 0.0365 | ns | | |
| Fc | | | | | | | | | |
| 411 BCMA- | <0.0001 | ns | ns | ns | ns | 0.0485 | ns | ns | |
| Fc | | | | | | | | | |
| Naive | <0.0001 | ns | 0.0159 | 0.0026 | ns | ns | ns | ns | ns |

TABLE E37
Statistical Comparisons Across All Treatment Groups for Numbers of Naïve CD4+ T Cells

| | | | 186 | CTLA4 186- | | | | | |
|---|---|---|---|---|---|---|---|---|---|
| | | | CTLA- | GSG4S-Fc- | TACI | TACI | 406 | 381 | 411 |
| Treatment | Fc | | 4vIgD- | (G4S)4- | 30-110- | 13-118- | BCMA- | BCMA- | BCMA- |
| Group | control | abatacept | Fc | TACI 541 | Fc | Fc | Fc | Fc | Fc |
| abatacept | ns | | | | | | | | |
| 186 CTLA-4 | ns | ns | | | | | | | |
| vIgD-Fc | | | | | | | | | |
| CTLA4 186- | 0.0017 | 0.0108 | 0.0033 | | | | | | |
| GSG4S-Fc- | | | | | | | | | |
| (G4S)4- | | | | | | | | | |
| TACI 541 | | | | | | | | | |
| TACI 30-110- | ns | ns | ns | 0.0139 | | | | | |
| Fc | | | | | | | | | |
| TACI 13-118- | ns | ns | ns | 0.0148 | ns | | | | |
| Fc | | | | | | | | | |
| 406 BCMA- | ns | ns | ns | 0.0064 | ns | ns | | | |
| Fc | | | | | | | | | |
| 381 BCMA- | ns | ns | ns | 0.0484 | ns | ns | ns | | |
| Fc | | | | | | | | | |
| 411 BCMA- | ns | ns | ns | ns | ns | ns | ns | ns | |
| Fc | | | | | | | | | |
| Naive | 0.0433 | ns | ns | ns | ns | ns | ns | ns | ns |

TABLE E38
Statistical Comparisons Across All Treatment Groups for Numbers of CD4+ Tcm Cells

| | | | 186 | CTLA4 186- | | | | | |
|---|---|---|---|---|---|---|---|---|---|
| | | | CTLA- | GSG4S-Fc- | TACI | TACI | 406 | 381 | 411 |
| Treatment | Fc | | 4vIgD- | (G4S)4- | 30-110- | 13-118- | BCMA- | BCMA- | BCMA- |
| Group | control | abatacept | Fc | TACI 541 | Fc | Fc | Fc | Fc | Fc |
| abatacept | 0.0047 | | | | | | | | |
| 186 CTLA-4 | 0.0017 | ns | | | | | | | |
| vIgD-Fc | | | | | | | | | |
| CTLA4 186- | <0.0001 | 0.0019 | 0.0131 | | | | | | |
| GSG4S-Fc- | | | | | | | | | |
| (G4S)4- | | | | | | | | | |
| TACI 541 | | | | | | | | | |
| TACI 30-110- | ns | ns | ns | <0.0001 | | | | | |
| Fc | | | | | | | | | |
| TACI 13-118- | ns | ns | 0.0462 | <0.0001 | ns | | | | |
| Fc | | | | | | | | | |
| 406 BCMA- | ns | ns | ns | 0.0001 | ns | ns | | | |
| Fc | | | | | | | | | |
| 381 BCMA- | 0.0003 | ns | ns | 0.0212 | 0.0495 | 0.0151 | ns | | |
| Fc | | | | | | | | | |
| 411 BCMA- | 0.0002 | ns | ns | 0.0291 | 0.0368 | 0.0107 | 0.0414 | ns | |
| Fc | | | | | | | | | |
| Naive | ns | ns | ns | <0.0001 | ns | ns | ns | 0.0461 | 0.0337 |

TABLE E39
Statistical Comparisons Across All Treatment Groups for Numbers of CD4+ Tem Cells

| | | | 186 | CTLA4 186- | | | | | |
|---|---|---|---|---|---|---|---|---|---|
| | | | CTLA- | GSG4S-Fc- | TACI | TACI | 406 | 381 | 411 |
| Treatment | Fc | | 4vIgD- | (G4S)4- | 30-110- | 13-118- | BCMA- | BCMA- | BCMA- |
| Group | control | abatacept | Fc | TACI 541 | Fc | Fc | Fc | Fc | Fc |
| abatacept | <0.0001 | | | | | | | | |
| 186 CTLA-4 | <0.0001 | ns | | | | | | | |
| vIgD-Fc | | | | | | | | | |
| CTLA4 186- | <0.0001 | 0.0003 | 0.0009 | | | | | | |
| GSG4S-Fc- | | | | | | | | | |
| (G4S)4- | | | | | | | | | |
| TACI 541 | | | | | | | | | |
| TACI 30-110- | 0.0088 | ns | ns | <0.0001 | | | | | |
| Fc | | | | | | | | | |
| TACI 13-118- | 0.0355 | 0.027 | 0.0288 | <0.0001 | ns | | | | |
| Fc | | | | | | | | | |
| 406 BCMA- | 0.0236 | ns | ns | <0.0001 | ns | ns | | | |
| Fc | | | | | | | | | |
| 381 BCMA- | 0.0002 | ns | ns | <0.0001 | ns | ns | ns | | |
| Fc | | | | | | | | | |
| 411 BCMA- | <0.0001 | ns | ns | 0.0012 | 0.0365 | 0.0091 | 0.0282 | ns | |
| Fc | | | | | | | | | |
| Naive | <0.0001 | ns | ns | 0.0021 | 0.0128 | 0.0026 | 0.0103 | ns | ns |

TABLE E40
Statistical Comparisons Across All Treatment Groups for Numbers of Naïve CD8+ T Cells

| | | | 186 | CTLA4 186- | | | | | |
|---|---|---|---|---|---|---|---|---|---|
| | | | CTLA- | GSG4S-Fc- | TACI | TACI | 406 | 381 | 411 |
| Treatment | Fc | | 4vIgD- | (G4S)4- | 30-110- | 13-118- | BCMA- | BCMA- | BCMA- |
| Group | control | abatacept | Fc | TACI 541 | Fc | Fc | Fc | Fc | Fc |
| abatacept | ns | | | | | | | | |
| 186 CTLA-4 | ns | ns | | | | | | | |
| vIgD-Fc | | | | | | | | | |
| CTLA4 186- | 0.01 | 0.036 | 0.0147 | | | | | | |
| GSG4S-Fc- | 09 | 2 | | | | | | | |
| (G4S)4- | | | | | | | | | |
| TACI 541 | | | | | | | | | |
| TACI 30-110- | ns | ns | ns | 0.0107 | | | | | |
| Fc | | | | | | | | | |
| TACI 13-118- | ns | ns | ns | 0.0197 | ns | | | | |
| Fc | | | | | | | | | |
| 406 BCMA- | ns | ns | ns | 0.0019 | ns | ns | | | |
| Fc | | | | | | | | | |
| 381 BCMA- | ns | ns | ns | 0.0195 | ns | ns | ns | | |
| Fc | | | | | | | | | |
| 411 BCMA- | ns | ns | ns | 0.0184 | ns | ns | ns | ns | |
| Fc | | | | | | | | | |
| Naive | ns | ns | ns | ns | ns | ns | 0.016 | ns | ns |

TABLE E41
Statistical Comparisons Across All Treatment Groups for Numbers of CD8+ Tcm Cells

| | | | 186 | CTLA4 186- | | | | | |
|---|---|---|---|---|---|---|---|---|---|
| | | | CTLA- | GSG4S-Fc- | TACI | TACI | 406 | 381 | 411 |
| Treatment | Fc | | 4vIgD- | (G4S)4- | 30-110- | 13-118- | BCMA- | BCMA- | BCMA- |
| Group | control | abatacept | Fc | TACI 541 | Fc | Fc | Fc | Fc | Fc |
| abatacept | ns | | | | | | | | |
| 186 CTLA-4 | ns | ns | | | | | | | |
| vIgD-Fc | | | | | | | | | |
| CTLA4 186- | 0.0013 | ns | 0.0303 | | | | | | |
| GSG4S-Fc- | | | | | | | | | |
| (G4S)4- | | | | | | | | | |
| TACI 541 | | | | | | | | | |
| TACI 30-110- | ns | 0.0077 | 0.0422 | <0.0001 | | | | | |
| Fc | | | | | | | | | |
| TACI 13-118- | ns | 0.0131 | ns | <0.0001 | ns | | | | |
| Fc | | | | | | | | | |
| 406 BCMA- | ns | 0.0019 | 0.0118 | <0.0001 | ns | ns | | | |
| Fc | | | | | | | | | |
| 381 BCMA- | ns | ns | ns | 0.0054 | ns | ns | 0.0294 | | |
| Fc | | | | | | | | | |
| 411 BCMA- | ns | 0.0485 | ns | 0.0004 | ns | ns | ns | ns | |
| Fc | | | | | | | | | |
| Naive | 0.0016 | ns | 0.0408 | ns | <0.0001 | <0.0001 | <0.0001 | 0.0072 | 0.0004 |

TABLE E42
Statistical Comparisons Across All Treatment Groups for Numbers of CD8+ Tem Cells

| | | | 186 | CTLA4 186- | | | | | |
|---|---|---|---|---|---|---|---|---|---|
| | | | CTLA- | GSG4S-Fc- | TACI | TACI | 406 | 381 | 411 |
| Treatment | Fc | | 4vIgD- | (G4S)4- | 30-110- | 13-118- | BCMA- | BCMA- | BCMA- |
| Group | control | abatacept | Fc | TACI 541 | Fc | Fc | Fc | Fc | Fc |
| abatacept | ns | | | | | | | | |
| 186 CTLA-4 | ns | ns | | | | | | | |
| vIgD-Fc | | | | | | | | | |
| CTLA4 186- | 0.0391 | ns | 0.0476 | | | | | | |
| GSG4S-Fc- | | | | | | | | | |
| (G4S)4- | | | | | | | | | |
| TACI 541 | | | | | | | | | |
| TACI 30-110- | ns | 0.0148 | ns | 0.0007 | | | | | |
| Fc | | | | | | | | | |
| TACI 13-118- | ns | 0.0061 | ns | 0.0002 | ns | | | | |
| Fc | | | | | | | | | |
| 406 BCMA- | ns | ns | ns | 0.0061 | ns | ns | | | |
| Fc | | | | | | | | | |
| 381 BCMA- | ns | ns | ns | ns | ns | 0.03 | ns | | |
| Fc | | | | | | | | | |
| 411 BCMA- | ns | ns | ns | 0.0081 | ns | ns | ns | ns | |
| Fc | | | | | | | | | |
| Naive | 0.0166 | ns | 0.0223 | ns | 0.0002 | <0.0001 | 0.0022 | 0.0447 | 0.0028 |

[1019] Together, these results indicate that BCMA vTD-containing single domain Fc fusion molecules, or the multi-stack domain molecule (CTLA-4 186 GSG4S Fc (G4S)4 TACI 541 (SEQ ID NO: 610)), that inhibit B and/or T cell activity can reduce immune responses and cell subset changes mediated by the T cell-dependent antigen KLH in vivo (i.e. anti-KLH levels in serum and changes in immune cell subsets). These results are consistent with the evaluation of the CTLA-4 and BCMA/TACI multidomain stack proteins, or single TACI or BCMA domain B cell inhibitory molecules, as clinical therapeutics in the treatment of autoimmune and inflammatory diseases in which hyperactive lymphocytes play a role.

### Example 14. Evaluation in Sjogren's Syndrome Model in Non-Obese Diabetic Mice

[1020] This Example describes the assessment of exemplary single-domain 186-CTLA4-Fc fusion protein (variant CTLA-4 SEQ ID NO: 186 fused to Fc set forth in SEQ ID NO:589), and multi-domain stack molecule CTLA4 186-GSG4S-Fc-(G4S)4-TACI 541 (multidomain stack Fc fusion set forth in SEQ ID NO: 610) in an in vivo short term model of Sjogren's syndrome in NOD mice, including assessment of sialadenitis, serum levels of test molecules and insulitis.

[1021] The Sjogren's syndrome model was induced in female diabetes-prone NOD/ShiLtJ mice (about 6 weeks of age) by repeat dosing of an anti-mPD-L1 antibody. Specifically, 0.1 mg of anti-mPD-L1 antibody was administered by intraperitoneal injection on days 0, 2, 4, and 6. Test molecule fusion proteins were dosed on days 0, 2 and 4 according to Table E43 below.

TABLE E43
Treatment Groups and Dosing Regimens

| | | | | | mAb |
|---|---|---|---|---|---|
| | | Anti-mPD-L1 | | | Treatment and |
| | | Treatment | Test Article | TA Dose | TA dosing |
| Group | N | (IP) | (TA) | Level (IP) | Days |
| 1 | 15 | 0.1 mg | Fc control | 0.28 mg | 0, 2, 4, 6 and |
| | | | | | 0, 2 4 |
| 2 | 15 | 0.1 mg | 186-CTLA4- | 0.42 mg | 0, 2, 4, 6 and |
| | | | Fc | | 0, 2 4 |
| 4 | 15 | 0.1 mg | CTLA4 186- | 0.5 mg | 0, 2, 4, 6 and |
| | | | GSG4S-Fc- | | 0, 2 4 |
| | | | (G4S)4- | | |
| | | | TACI 541 | | |
| 6 | 5 | 0 | n/a | 0 | n/a |
| (naïve) | | | | | |

Abbreviations:
P = intraperitoneal(ly);
mg = milligram;
n/a = not applicable

[1022] Blood was obtained from the tail vein of mice (2-5 μL) on days 7, 8, 9, and 10, placed on a ReliOn Prime glucose test strip, and blood glucose (mg/dL) was measured using the ReliOn Prime Glucose Test System. At Day 10 of the experiment, mice were sacrificed and serum, submandibular glands (SMG), and pancreas were collected and analyzed.

[1023] The left SMG and pancreas were removed, dissected away from adjacent lymph nodes, and placed into neutral-buffered formalin (NBF) for approximately 72 hours, followed by transfer to 70% ethanol. The fixed tissues were embedded in paraffin, sectioned, and stained on glass slides with hematoxylin and eosin (H&E).

[1024] The scoring systems used to evaluate the extent of sialadenitis was scored as per Nandula et al. 2011 (Table 6 therein; reproduced as Table E44), and insulitis per Gutierrez et al 2014 (Table 7 therein; reproduced as Table E45).

TABLE E44
Histological Scoring Used to Evaluate Sialadenitis

| Score | Criteria |
|---|---|
| 0 | No inflammatory foci |
| 1 | 1-5 foci of >50 inflammatory cells |
| 2 | >5 foci without parenchymal destruction |
| 3 | Moderate parenchymal destruction |
| 4 | Extensive parenchymal destruction |

TABLE E45
Histological Scoring Used to Evaluate Insulitis

| Score | Criteria |
|---|---|
| 0 | No insulitis |
| 1 | Peri-islet insulitis |
| 2 | Intermediate insulitis |
| 3 | Intra-islet insulitis |
| 4 | Complete islet insulitis |

[1025] Statistically significant differences between groups for histology scores were determined using one-way analysis of variance (ANOVA) followed by Fisher's least significant difference (LSD) test. Blood glucose levels were analyzed for significant differences using Kruskal-Wallis (non-parametric) test followed by Dunn's multiple comparison test. GraphPad PRISM® software (Version 8.1.2) was used for statistical analyses and p values <0.05 were considered statistically significant for all statistical tests.

[1026] Treatment with both exemplary CTLA4 186-GSG4S-Fc-(G4S)4-TACI 541 reduced incidence of Sialoadenitis (FIG. 24A) and resulted in a significantly lower histology score (p<0.01) than the mean scores for Fc control (FIG. 24B). These results are consistent with a finding that treatment of anti-PD-Li injected NOD mice with the tested molecules reduced both the incidence and severity of sialadenitis in this model of Sjogren's syndrome.

[1027] The overall incidence of insulitis in these diabetes-prone mice and the degree of insulitis after treatment with the tested molecules is shown in FIG. 25A and FIG. 25B. CTLA4 186-GSG4S-Fc-(G4S)4-TACI 541 significantly reduced the degree of insulitis, as assessed by histological analysis (FIG. 25B).

[1028] FIG. 26 depicts mean blood glucose concentrations (mg/dL) as measured in the blood on Days 7, 8, 9 and 10 for each tested group. As shown, blood glucose levels were significantly lower in the 186-CTLA-4 Fc and CTLA4 186-GSG4S-Fc-(G4S)4-TACI 541 treated groups compared to the Fc control on Day 7 (p<0.05, p<0.01, and p<0.001, respectively). There was a trend for lower blood glucose levels with treatment with the multi-domain stack molecule CTLA4 186-GSG4S-Fc-(G4S)4-TACI 541 at other time points compared to the Fc control.

[1029] Together, these results indicate treatment with the tested exemplary multi-domain TACI-CTLA-4 molecule reduced the incidence and severity of sialadenitis in this mouse model of Sjogren's syndrome, and was generally effective at maintaining a lower blood glucose level over the course of study. These results indicate the potential for TACI-CTLA-4 containing multi-domain stack molecules in therapeutic use for treating Sjogren's syndrome, and for TACI-CTLA-4 multi-domain stack molecules as therapeutics to impact the onset of type 1 diabetes in humans.

### Example 15: Assessment of the Activity of Multi-Specific Constructs in an In Vivo Mouse Lupus Model

[1030] This Example describes the assessment of an exemplary CTLA4 186-GSG4S-Fc-(G4S)4-TACI 541 multi-domain molecule on immune responses in an in vivo murine bm12 inducible SLE model.

[1031] C57BL/6NJ (C57BL/6) mice were randomly assigned to the groups outlined in Table E45. Spleens from female I-A^{bm12}B6(c)-H2-Ab1^{bm12}/KhEgJ (‘bm12’)mice were processed aseptically to single cell suspensions in RPMI media and pooled into a total of 8 mL. A total of 0.2 mL of pooled bm12 splenocytes were adoptively transferred by injection via intraperitoneal delivery to 39 C57BL/6 “recipient” mice. Alloactivation of donor bm12 CD4+ T cells by recipient antigen presenting cells leads to chronic GVHD symptoms with symptoms closely resembling SLE, including autoantibody production, changes in immune cell subsets, and mild kidney disease. Glomerulonephritis with immune complex deposition develops late in the model, largely comprised of autoantigens bound to IgG1, IgG2b, IgG2c and IgG3 antibodies.

[1032] Recipient mice received doses of test molecules described in Table E45, starting at 1 hours after transfer of splenocytes, and then every 3-4 days, for a total of 22 doses; the last dose was administered 1 week prior to termination (last dose on Day 75). As a control, mice were treated with Fc control, WT full ECD TACI-Fc (abatacept) and TACI 30-110-Fc (TACI 30-110, SEQ ID NO:718; corresponding to the TACI ECD portion in atacicept). Five C57BL/6 and 5 bm12 mice were retained for use as naïve, untreated controls.

TABLE E46
Treatment Groups and Dosing Regimens

| | | Splenocyte | | | | Dosing |
|---|---|---|---|---|---|---|
| | | transfer | | | Dosing | Volume |
| Group | N | on Day 0 | Test Articles | Dose (μg) | Regimen | (IP) |
| 1 | 10 | bm12→C57BL/6 | Fc control | 250 | Q3-4D × 22 | 0.1 mL |
| 2 | 9 | bm12→C57BL/6 | Abatacept | 400 | Q3-4D × 22 | 0.1 mL |
| 3 | 10 | bm12→C57BL/6 | TACI-30-110 | 350 | Q3-4D × 22 | 0.1 mL |
| | | | Fc | | | |
| 4 | 10 | bm12→C57BL/6 | CTLA4 186- | 460 | Q3-4D × 22 | 0.1 mL |
| | | | GSG4S-Fc- | | | |
| | | | (G4S)4-TACI | | | |
| | | | 541 | | | |
| 5 | 5 | None (naïve | Untreated | n/a | n/a | n/a |
| | | C57BL/6 mice) | (naïve C57BL/6 | | | |
| | | | mice) | | | |
| 6 | 5 | None (naïve bm12 | Untreated | n/a | n/a | n/a |
| | | mice) | (naïve bm12 | | | |
| | | | mice) | | | |

Q3-4D × 22: every 3-4 days for a total of 22 doses.

[1033] Statistically significant differences between groups for serum levels of anti-dsDNA antibodies, IgG isotypes, BUN, and CRE at specific time points were determined using one-way analysis of variance (ANOVA). Normality testing was performed to determine whether to use standard ANOVA (used for normally distributed data) or the non-parametric Kruskal-Wallis test. Multiple comparison tests between groups were performed using either uncorrected Fisher's Least Significant Difference (LSD) test (for standard ANOVA) or uncorrected Dunn's test (for Kruskal-Wallis). For flow cytometry data, significant differences between groups were analyzed using Student's unpaired, two-tailed T test. GraphPad PRISM® software (Version 8.1.2) was used for statistical analyses and p values <0.05 were considered statistically significant for all statistical tests.

[1034] Blood Urea Nitrogen (BUN) and Serum Creatine (CRE) Concentrations

[1035] Serum collected at day 82 (study termination, 7 days after last dose) were analyzed for BUN and CRE. As shown in FIG. 27, the BUN concentrations were significantly elevated in the model as noted by the modestly higher concentrations in the Fc control group vs. the näive C57BL/6 group (p<0.05). Both the CTLA4 186-GSG4S-Fc-(G4S)4-TACI 541- and the TACI 30-110-FC-Fc group each showed significantly lower BUN concentrations as compared to the abatacept-treated group. Overall, the increase in CRE levels in the Fc control group were minimal in this study and there were no significant differences between any of the groups.

[1036] Serum IgG Isotype Concentration

[1037] Serum was collected over time during the study and sample from Day 14, 42, and 82 were analyzed for concentrations of IgG2b, IgG2c, and IgG3 using Mouse IgG2b, Mouse IgG2c and Mouse IgG3 enzyme-linked immunosorbent assay (ELISA) kits according to manufacturer's instructions. (Abcam; Cambridge, UK). Only day 82 (terminal) serum samples were analyzed for native bm12 mice. These IgG isotypes have previously been shown to be increased in immune complexes in the bm12 model, and thus are potentially pathogenic; specifically, the serum concentrations have been shown to increase during the first 4-5 weeks in the model and gradually decrease over time (Akieda et al., 2015 J. Immunol. 194(9):4162-74).

[1038] As shown in FIGS. 28A-28C, serum collected from Days 14, 42 and 82 show that treatment with the exemplary TACI-CTLA-4 multi-domain stack molecule CTLA4 186-GSG4S-Fc-(G4S)4-TACI 541 resulted in consistently and sustained low levels of each of the IgG isotypes throughout the study, being significantly different than both the Fc control and TACI 30-110-FC-Fc groups for each IgG isotype and at each of the time points tested. Although the control molecule WT TACI-Fc (abatacept) resulted in significantly lower levels of each IgG isotype as compared to the Fc only control at the Day 14 time point and in lower IgG2b concentrations at Day 82, the exemplary TACI-CTLA-4 multi-domain stack molecule resulted in significantly lower levels of each of the IgG isotypes as compared to abatacept at the Day 42 and Day 82 time points. Overall, treatment of mice with the exemplary TACI-CTLA-4 multi-domain stack molecule reduced the levels of these pathogenic IgG isotypes in serum as much as, or more so than, abatacept, and always more so than the TACI 30-110-FC-Fc.

[1039] Serum Anti-dsDNA Antibody Analysis

[1040] Serum was collected over time during the study and samples from Day 7, 14, 28, 42, 70, and 82 were analyzed for concentrations of anti-dsDNA antibodies using a Mouse Anti-dsDNA IgG Antibody Assay Kit according to the manufacturer's instructions (Chondrex, Inc; Redmond, Wash.). Similar to the serum IgG isotype patterns over time, anti-dsDNA antibody levels peaked at about 6 weeks and gradually diminished over the next several weeks. As shown in FIG. 29 serum collected from subsets of mice in each treatment group on Days 7, 14, 28, 42, 70, and 82 and assayed by ELISA showed consistently low levels of anti-dsDNA antibody levels at each time point for the exemplary TACI-CTLA-4 multi-domain stack molecule, CTLA4 186-GSG4S-Fc-(G4S)4-TACI 541 treatment group. Treatment with WT TACI-Fc (abatacept) resulted in significantly lower concentrations of anti-dsDNA than the Fc control group at Day 14, 28 and 42, however, treatment with the exemplary TACI-CTLA-4 multi-domain stack molecule were significantly lower than in the abatacept group at Day 7 and Day 82. These results show that the exemplary TACI-CTLA-4 multi-domain stack molecule consistently reduced concentrations of serum anti-dsDNA antibodies, an important pathogenic antibody in SLE, more potently than abatacept.

[1041] Immunophenotyping of Lymphocyte Subsets

[1042] Mice were sacrificed on Day 82, and blood and tissues were collected as follows: cervical lymph node (LN) and part of the spleen were placed in Dulbecco's phosphate buffered saline on ice for flow cytometry. This half of spleen and the LN were each mechanically processed into single cell suspensions, the red blood cells (RBC) in the spleen cells lysed with 1X RBC Lysis Buffer (BioLegend), and the cells counted. One million live cells from spleen and LN preparations were stained with flow cytometry reagents, and immunophenotyped to track lymphocyte subsets.

[1043] Table E47 sets forth the spleen weight, number of spleen cells (spleen cell #) and percentages of different cell subsets in spleens of treated mice as determined by flow immunophenotyping. Table E48 sets forth the percentages of different cell subsets in cervical LN of treated mice.

[1044] The results demonstrated multiple effects on immune cell subsets associated with SLE, including reductions in the percentage and number of germinal center (GC) B cells and CD4+ T_{FH} cells, compared to Fc control-treated mice. Further, treatment with the TACI-CTLA4-Fc multi-domain stack molecule reduced B220+ cells in spleen and LN compared to other treatment groups, spared immature T1 cells, but significantly reduced more mature marginal zone (MZ), T2, follicular B cells, and antibody-producing plasma cells in the spleen. Without wishing to be bound by theory, these results indicate that the B cell compartment could repopulate from the unaffected T1 cells following washout of the test molecule.

[1045] The results also demonstrated that treatment with the TACI-CTLA-Fc multi-domain stack molecule reduced CD4+ and CD8⁺ Tem and increased CD4+ and CD8⁺ Tem cell subsets in spleen and LN compared to Fc control treatment. Further, treatment with the TACI-CTLA-Fc multi-domain stack molecule also reduced the percentage of ICOS⁺ CD4⁺ and CD8⁺ cells in spleen and LN compared to each of the other treatment groups.

TABLE E47
Spleen Immunophenotyping: Statistical Comparison Between Treatment Groups

| | | | | TACI-CTLA-4 |
|---|---|---|---|---|
| | | TACI-CTLA- | TACI-CTLA- | multi-domain |
| | | 4 multi- | 4 multi- | stack molecule |
| | | domain stack | domain stack | vs. |
| | Abatacept vs. | molecule vs. | molecule vs. | TACI 30-110- |
| Data Set | Fc Control | Fc Control | Abatacept | FC |
| Spleen weight | 0.002 | <0.0001 | <0.0001 | 0.0002 |
| Spleen cell # | ns | 0.0002 | 0.0017 | 0.0009 |
| % CD45+ of live cells spleen | ns | ns | ns | ns |
| CD45+ cell #/spleen | ns | 0.0078 | 0.0145 | 0.0312 |
| % B220+ cells of CD45+ cells | ns | <0.0001 | <0.0001 | <0.0001 |
| B220+ cell #/spleen | ns | <0.0001 | <0.0001 | 0.0011 |
| % CD3+ cells of CD45+ cells | ns | <0.0001 | <0.0001 | <0.0001 |
| CD3+ cell #/spleen | ns | 0.0042 | 0.0219 | ns |
| % GC B cells of B220+ cells | 0.0037 | 0.0056 | ns | 0.0182 |
| GC B cell #/spleen | 0.0129 | 0.0011 | 0.001 | 0.0062 |
| % Plasma cells of B220+ cells | 0.0375 | <0.0001 | 0.0013 | 0.0011 |
| Plasma cell #/spleen | 0.0152 | 0.0011 | 0.0005 | 0.0279 |
| % MZ B cells of CD19+ cells | ns | <0.0001 | 0.0002 | 0.0416 |
| MZ B cell #/spleen | ns | <0.0001 | <0.0001 | ns |
| % T1 B cells of CD19+ cells | ns | <0.0001 | <0.0001 | <0.0001 |
| T1 B cell #/spleen | ns | ns | ns | ns |
| % T2 B cells of CD19+ cells | 0.0161 | <0.0001 | <0.0001 | <0.0001 |
| T2 B cell #/spleen | ns | <0.0001 | <0.0001 | ns |
| % Foll B cells of CD19+ cells | 0.0161 | <0.0001 | <0.0001 | <0.0001 |
| Foll B cell #/spleen | ns | <0.0001 | <0.0001 | 0.0017 |
| % CD4+ T cells of CD45+ cells | ns | <0.0001 | <0.0001 | 0.023 |
| CD4+ T cell #/spleen | ns | 0.0217 | ns | ns |
| % CD8+ T cells of CD45+ cells | 0.0013 | <0.0001 | <0.0001 | <0.0001 |
| CD8+ T cell #/spleen | ns | 0.0009 | 0.0049 | ns |
| CD4+ T cell % hIgG+ cells | 0.0319 | <0.0001 | 0.0005 | <0.0001 |
| CD8+ T cell % hIgG+ cells | ns | 0.0154 | 0.0075 | ns |
| CD45+ CD3⁻ % hIgG+ non-T | ns | <0.0001 | <0.0001 | <0.0001 |
| cells | | | | |
| CD4+ T cell % ICOS+ cells | <0.0001 | <0.0001 | 0.0082 | <0.0001 |
| CD4+ T cell ICOS+ cell #/spleen | ns | ns | ns | 0.0018 |
| CD8+ T cell % ICOS+ cells | 0.0009 | <0.0001 | 0.0171 | <0.0001 |
| CD8+ T cell ICOS+ cell #/spleen | ns | ns | ns | 0.0102 |
| CD4+ T cell % CD28+ cells | <0.0001 | <0.0001 | 0.0494 | 0.0002 |
| CD4+ T cell CD28+ cell #/spleen | ns | 0.0154 | ns | ns |
| CD8+ T cell % CD28+ cells | 0.0379 | 0.0202 | ns | <0.0001 |
| CD8+ T cell CD28+ cell #/spleen | ns | 0.0005 | 0.0051 | 0.0131 |
| CD4+ % Treg cells | <0.0001 | <0.0001 | 0.0001 | 0.0002 |
| CD4+ Treg cell #/spleen | 0.01 | 0.0002 | ns | 0.0033 |
| CD4+ % T_{FH} cells | 0.0002 | <0.0001 | <0.0001 | 0.0005 |
| CD4+ T_{FH} cell #/spleen | 0.0044 | 0.0009 | 0.0019 | 0.0061 |
| CD4+ % Naïve T cells | ns | <0.0001 | 0.0001 | 0.0001 |
| CD4+ Naive T cell #/spleen | ns | 0.0004 | 0.0131 | ns |
| CD4+ % Tem cells | <0.0001 | <0.0001 | 0.0002 | <0.0001 |
| CD4+ Tem cell #/spleen | 0.0287 | 0.0063 | ns | <0.0001 |
| CD4+ % Tcm cells | <0.0001 | <0.0001 | ns | <0.0001 |
| CD4+ Tcm cell #/spleen | 0.0066 | <0.0001 | ns | 0.0037 |
| CD8+ % Naïve T cells | ns | 0.002 | 0.0078 | 49 |
| CD8+ Naive T cell #/spleen | ns | <0.0001 | 0.0013 | 0.0129 |
| CD8+ % Tem cells | 0.0033 | 0.0002 | 0.0026 | 0.0002 |
| CD8+ Tem cell #/spleen | 0.0156 | 0.0207 | ns | 0.0195 |
| CD8+ % Tcm cells | 0.0001 | ns | ns | ns |
| CD8+ Tcm cell #/spleen | ns | 0.001 | 0.0447 | ns |

ns = not significant

TABLE E48
Cervical Lymph Node (LN) Immunophenotyping: Statistical Comparisons
Between Treatment Groups

| | | | | TaBLI vs. |
|---|---|---|---|---|
| | Abatacept vs. | TaBLI vs. | TaBLI vs. | TACI 30-110- |
| Data Set | Fc Control | Fc Control | Abatacept | FC |
| % CD45+ of Live cells | ns | ns | ns | ns |
| % B220+ of CD45+ cells | ns | <0.0001 | <0.0001 | 0.0003 |
| % CD3+ of CD45+ cells | ns | <0.0001 | <0.0001 | <0.0001 |
| % GC B cells of B220+ cells | 0.0237 | ns | 0.0324 | ns |
| % Plasma cells of B220+ cells | ns | 0.0002 | 0.0057 | 0.0005 |
| % MZ B cells of CD19+ cells | 0.0244 | 0.0029 | <0.0001 | 0.0378 |
| % T1 B cells of CD19+ cells | ns | <0.0001 | <0.0001 | <0.0001 |
| % T2 B cells of CD19+ cells | ns | ns | ns | 0.0005 |
| % Fol B cells of CD19+ cells | ns | <0.0001 | <0.0001 | <0.0001 |
| % CD4+ of CD45+ cells | ns | <0.0001 | <0.0001 | 0.0053 |
| % CD8+ of CD45+ cells | ns | <0.0001 | <0.0001 | <0.0001 |
| CD4+ % Treg cells | 0.0002 | <0.0001 | 0.0049 | <0.0001 |
| CD4+ % Tfh cells | 0.0029 | 0.0007 | 0.0002 | 0.0003 |
| CD4+ % hIgG+ cells | ns | ns | ns | ns |
| CD4+ % CD28+ cells | 0.0013 | 0.0004 | ns | 0.0001 |
| CD4+ % ICOS+ cells | 0.0012 | <0.0001 | 0.0387 | <0.0001 |
| CD8+ % hIgG+ cells | ns | ns | ns | 0.0249 |
| CD8+ % CD28+ cells | 0.0303 | 0.0001 | ns | 0.0001 |
| CD8+ % ICOS+ cells | 0.0408 | <0.0001 | 0.0459 | <0.0001 |
| CD45+ CD3⁻ % hIgG+ non-T | ns | <0.0001 | <0.0001 | 0.0218 |
| cells | | | | |
| CD4+ % Naïve T cells | ns | ns | ns | 0.0002 |
| CD4+ % Tem T cells | 0.0415 | 0.0107 | ns | ns |
| CD4+ % Tcm T cells | 0.0007 | 0.0003 | ns | 0.0437 |
| CD8+ % Naïve T cells | 0.0483 | ns | ns | ns |
| CD8+ % Tem T cells | 0.0192 | 0.0245 | ns | ns |
| CD8+ % Tcm T cells | 0.0189 | ns | ns | ns |

ns = not significant

### CONCLUSION

[1046] These results support that a multi-domain TACI-CTLA-4 stack molecule, such as the exemplary CTLA4 186-GSG4S-Fc-(G4S)4-TACI 541 multi-domain stack molecule, is capable of inhibiting the expansion of key B and T lymphocyte subsets and reducing the formation of autoantibodies and potentially pathogenic IgG in an induced mouse model of chronic GVHD and SLE, in most cases more effectively than either TACI 30-110-Fc or abatacept. These findings indicate that inhibiting both the BAFF/APRIL B cell and CD80/86-CD28 costimulatory T cell pathways simultaneously may result in significant disease amelioration and control of pathogenic lymphocytes in SLE. Consequently, the dual pathway inhibitor achieved by a multi-domain TACI-CTLA-4 multi-domain stack molecule may be an effective treatment of SLE in humans.

### Example 16. Assessment of Exemplary Monomeric and Tetrameric Constructs

[1047] Additional BCMA Fc fusion proteins were generated containing one (monomeric) or four (tetrameric barbell and tetrameric tandem) BCMA domains using the WT BCMA set forth in SEQ ID NO:356 and the BCMA vTD set forth in SEQ ID NO:406 (H19L). The monomeric and tetrameric BCMA WT and BCMA vTD were formatted as BCMA WT and BCMA vTD-Fc fusion proteins with an Fc domain. The exemplary generated Fc fusion proteins were generated substantially as described in Example 4, and are described in Tables E49A-E49C.

[1048] Briefly, to generate recombinant monomeric immunomodulatory proteins as single chain Fc fusion proteins, the encoding DNA was generated to encode a protein as follows: WT BCMA or variant BCMA domain followed by a linker of 12 amino acids (GSGGGGSGGGGS; SEQ ID NO: 805) followed by a single chain Fc (scFc) set forth in SEQ ID NO:852 (composed of a human IgG1 effectorless Fc sequence containing the mutations L234A, L235E and G237A, by the Eu Index numbering system for immunoglobulin proteins (SEQ ID NO:589) followed by a (GGGGS)₁₃ linker (SEQ ID NO:806) followed by the second a human IgG1 effectorless Fc sequence containing the mutations L234A, L235E and G237A, by the Eu Index numbering system for immunoglobulin proteins). The generated molecules are summarized in Table E49A.

TABLE E49A
Exemplary Monomeric Immunomodulatory Proteins

| AA SEQ | NT SEQ ID | | BCMA | LINKER SEQ | FC |
|---|---|---|---|---|---|
| ID NO | NO | DESCRIPTION | SEQ ID NO | ID NO | SEQ ID NO |
| 807 | 814 | BCMA 356- | 356 | 805 | 821 |
| | | GS(G4S)2 814-scFc | | | |
| | | 852 | | | |
| 810 | 817 | BCMA 406- | 406 | 805 | 821 |
| | | GS(G4S)2 814-scFc | | | |
| | | 852 | | | |

[1049] To generate recombinant tetrameric immunomodulatory proteins as Fc fusion proteins, proteins were generated in different formats as follows:

[1050] In one format, the encoding DNA was generated to encode three different protein versions as follows: BCMA Fc (SEQ ID NO:813): BCMA vTD domain SEQ ID NO:406 followed by a linker of (G4S)3 SEQ ID NO:595; followed by a BCMA vTD domain SEQ ID NO: 406; followed by a linker of GSGGGGS SEQ ID NO: 590; followed by a human IgG1 effectorless Fc sequence containing the mutations L234A, L235E and G237A, by the Eu Index numbering system for immunoglobulin proteins (SEQ ID NO:589).

[1051] In one format, the encoding DNA was generated to encode three different protein versions as follows: WT BCMA (SEQ ID NO:809): WT BCMA domain SEQ ID NO:356 followed by a linker of GSGGGGS SEQ ID NO: 590; followed by a human IgG1 effectorless Fc sequence containing the mutations L234A, L235E and G237A, by the Eu Index numbering system for immunoglobulin proteins (SEQ ID NO:589) followed by a linker of (G4S)3 SEQ ID NO: 595 followed by WT BCMA domain SEQ ID NO:356.

[1052] In one format, the encoding DNA was generated to encode three different protein versions as follows: BCMA Fc SEQ ID NO:812): BCMA vTD set forth in SEQ ID NO:406 followed by a linker of GSGGGGS SEQ ID NO: 590; followed by a human IgG1 effectorless Fc sequence containing the mutations L234A, L235E and G237A, by the Eu Index numbering system for immunoglobulin proteins (SEQ ID NO:589) followed by a linker of (G4S)3 SEQ ID NO: 595 followed by BCMA vTD set forth in SEQ ID NO:406.

TABLE E49B
Exemplary Tetrameric Immunomodulatory Proteins

| AA SEQ | NT SEQ | | 1^{ST} | | 2^{ND} | | |
|---|---|---|---|---|---|---|---|
| ID NO | ID NO | DESCRIPTION | BCMA | LINKER | BCMA | LINKER | Fc |
| 813 | 820 | BCMA 406- | 406 | 595 | 406 | 590 | 589 |
| | | (G4S)3 (595) | | | | | |
| | | BCMA 406- | | | | | |
| | | GSG4S (590) Fc | | | | | |
| | | 589 | | | | | |

TABLE E49C
Exemplary Tetrameric Immunomodulatory Proteins

| AA SEQ | NT SEQ | | 1^{ST} | | | | 2^{ND} |
|---|---|---|---|---|---|---|---|
| ID NO | ID NO | DESCRIPTION | BCMA | LINKER | FC | LINKER | BCMA |
| 809 | 816 | BCMA 356 GSG4S | 356 | 590 | 589 | 595 | 356 |
| | | (590) Fc 589 | | | | | |
| | | (G4S)3 (595) | | | | | |
| | | BCMA 356 | | | | | |
| 812 | 819 | BCMA 406- | 406 | 590 | 589 | 595 | 406 |
| | | GSG4S (590) Fc | | | | | |
| | | 589-(G4S)3(595) | | | | | |
| | | BCMA 406- | | | | | |

[1053] A. Bioactivity of Exemplary Multi-Domain Molecules

[1054] In one experiment, exemplary molecules set forth in Tables E49A-E49C were assessed using the Jurkat/NF-κB/TACI reporter cells for blockade of APRIL- or BAFF-mediated signaling. Table E50 provides the values for half maximal inhibitory concentration (IC50) for inhibition of APRIL- and BAFF-mediated TACI signaling. In some instances, the proteins tested were not compared to their parental of WT controls and appear as (−) in the Table below. The results in Table E50 demonstrate that all generated formats block both APRIL and BAFF mediated signaling.

TABLE E50
Assessment of Exemplary Monomeric and Tetrameric
Immunomodulatory Proteins

| SEQ | | APRIL | BAFF | BAFF |
|---|---|---|---|---|
| ID | | IC₅₀ | IC₅₀ | 60-mer IC₅₀ |
| NO | Format | (pM) | (pM) | (pM) |
| 807 | BCMA 356-GS(G4S)2 | — | — | — |
| | 814-Fc 589-(GGGGS)₁₃ | | | |
| | 815-Fc589 | | | |
| 809 | BCMA 356 GSG4S (590) | 3255 | 3073 | 84875 |
| | Fc 589 (G4S)3 (595) | | | |
| | BCMA 356 | | | |
| 810 | BCMA 406-GS(G4S)2 | — | — | — |
| | 814-Fc 589-(GGGGS)₁₃ | | | |
| | 815-Fc 589 | | | |
| 812 | BCMA 406-GSG4S | 2717 | 583 | 2324 |
| | (590) Fc 589- | | | |
| | (G4S)3(595) BCMA | | | |
| | 406- | | | |
| 813 | BCMA 406-(G4S)3 | 775 | 638 | 630 |
| | (595) BCMA 406- | | | |
| | GSG4S (590) Fc 589 | | | |

### Example 17. Generation of Multi-Domain T and B Cell Inhibitory Immunomodulatory Proteins

[1055] Multi-domain immunomodulatory proteins were generated as homodimeric Fc fusions containing (1) a wild-type CTLA-4 extracellular domain as a T cell inhibitory molecule (TIM); and (2) a wild-type TACI extracellular domain portion or a variant thereof as a B cell inhibitory molecule (BIM) that binds to a B cell stimulatory receptor, such as BCMA or APRIL, generally as described in Example 7A.

[1056] The TIM (wild-type CTLA-4) or BIM (wild-type TACI or variant) ofthe multi-domain immunomodulatory protein were variously linked to the N- or C-terminus of an Fc region via a peptide linker, such as a GSGGGGS (SEQ ID NO: 590) and (GGGGS)₄ (SEQ ID NO:600). To generate homodimeric Fc fusions, various exemplary IgG1 Fc regions were used, including the sequences set forth in SEQ ID NO:589, 822, 823 and 824.

[1057] Table E51 below sets forth exemplary generated multi-domain homodimeric immunomodulatory Fc fusion proteins.

TABLE E51
Multi-Domain Immunomodulatory Proteins (Homodimer)

| | | | CTLA-4 | TACI | Linker | Fc |
|---|---|---|---|---|---|---|
| | DNA SEQ ID | Protein SEQ ID | (SEQ ID | (SEQ ID | (SEQ ID | (SEQ ID |
| Description | NO | NO | NO) | NO) | NO) | NO) |
| (CTLA4 WT | 796 | 759 | CTLA-4 | 68-110 WT | GSG4S | Fc (589) |
| ECD 1) | | | ECD | (528) | (590) | |
| GSG4S Fc | | | (1) | | (G4S)4 | |
| 589 (G4S)4 | | | | | (600) | |
| (TACI 528) | | | | | | |
| (CTLA4 WT | 797 | 786 | CTLA-4 | 68-110 WT | GSG4S | Fc(853) |
| ECD 1) | | | ECD | (528) | (590) | |
| GSG4S Fc | | | (1) | | (G4S)4 | |
| 853 (G4S)4 | | | | | (600) | |
| (TACI 528) | | | | | | |
| (CTLA4 WT | 798 | 787 | CTLA-4 | 68-110 WT | GSG4S | Fc(854) |
| ECD 1) | | | ECD | (528) | (590) | |
| GSG4S Fc | | | (1) | | (G4S)4 | |
| 854 (G4S)4 | | | | | (600) | |
| (TACI 528) | | | | | | |
| (CTLA4 WT | 799 | 788 | CTLA-4 | Q75E, | GSG4S | Fc (589) |
| ECD 1) | | | ECD | R84Q(68- | (590) | |
| GSG4S Fc | | | (1) | 110) | | |
| 589 (G4S)4 | | | | (542) | (G4S)4 | |
| (TACI 542) | | | | | (600) | |
| (CTLA4 WT | 800 | 789 | CTLA-4 | Q75E, | GSG4S | Fc(853) |
| ECD 1) | | | ECD | R84Q(68- | (590) | |
| GSG4S Fc | | | (1) | 110) | (G4S)4 | |
| 853 (G4S)4 | | | | (542) | (600) | |
| (TACI 542) | | | | | | |
| (CTLA4 WT | 801 | 790 | CTLA-4 | Q75E, | GSG4S | Fc(854) |
| ECD 1) | | | ECD | R84Q(68- | (590) | |
| GSG4S Fc | | | (1) | 110) | (G4S)4 | |
| 854 (G4S)4 | | | | (542) | (600) | |
| (TACI 542) | | | | | | |
| (CTLA4 WT | 802 | 791 | CTLA-4 | 68-110 WT | GSG4S | Fc(855) |
| ECD 1) | | | ECD | (528) | (590) | |
| GSG4S Fc | | | (1) | | (G4S)4 | |
| 855 (G4S)4 | | | | | (600) | |
| (TACI 528) | | | | | | |
| (CTLA4 WT | 803 | 792 | CTLA-4 | Q75E, | GSG4S | Fc(855) |
| ECD 1) | | | ECD | R84Q(68- | (590) | |
| GSG4S Fc | | | (1) | 110) | (G4S)4 | |
| 855 (G4S)4 | | | | (542) | (600) | |
| (TACI 542) | | | | | | |

[1058] The present invention is not intended to be limited in scope to the particular disclosed embodiments, which are provided, for example, to illustrate various aspects of the invention. Various modifications to the compositions and methods described will become apparent from the description and teachings herein. Such variations may be practiced without departing from the true scope and spirit of the disclosure and are intended to fall within the scope of the present disclosure.

The application's sequence listing, which the Patent Office published only in electronic form, follows.

SEQUENCE LISTING (824 sequences)

SEQ ID NO: 1 - protein, 126 aa, Homo sapiens [sequence omitted]

SEQ ID NO: 2 - protein, 127 aa, Artificial Sequence
  CTLA-4 ECD
KAMHVAQPAVVLASSRGIASFVCEYASPGKATEVRVTVLRQADSQVTEVCAATYMMGNELTFLDDSICTGTSSGNQVNLTIQGLRAMDTGLYICKVELMYPPPYYLGIGNGTQIYVIDPEPCPDSDQ

SEQ ID NO: 3 - protein, 126 aa, Artificial Sequence
  L12P/A26T/L63P/L98Q/Y105L ECD
KAMHVAQPAVVPASSRGIASFVCEYTSPGKATEVRVTVLRQADSQVTEVCAATYMMGNELTFPDDSICTGTSSGNQVNLTIQGLRAMDTGLYICKVEQMYPPPYLLGIGNGTQIYVIDPEPCPDSD

SEQ ID NO: 4 - protein, 126 aa, Artificial Sequence
  L63P/L98R/N110K ECD
KAMHVAQPAVVLASSRGIASFVCEYASPGKATEVRVTVLRQADSQVTEVCAATYMMGNELTFPDDSICTGTSSGNQVNLTIQGLRAMDTGLYICKVERMYPPPYYLGIGKGTQIYVIDPEPCPDSD

SEQ ID NO: 5 - protein, 126 aa, Artificial Sequence
  L12P/A26T ECD
KAMHVAQPAVVPASSRGIASFVCEYTSPGKATEVRVTVLRQADSQVTEVCAATYMMGNELTFLDDSICTGTSSGNQVNLTIQGLRAMDTGLYICKVELMYPPPYYLGIGNGTQIYVIDPEPCPDSD

SEQ ID NO: 6 - protein, 126 aa, Artificial Sequence
  L12P/A26T/L63P ECD
KAMHVAQPAVVPASSRGIASFVCEYTSPGKATEVRVTVLRQADSQVTEVCAATYMMGNELTFPDDSICTGTSSGNQVNLTIQGLRAMDTGLYICKVELMYPPPYYLGIGNGTQIYVIDPEPCPDSD

SEQ ID NO: 7 - protein, 126 aa, Artificial Sequence
  L63P/L98Q/Y105L ECD
KAMHVAQPAVVLASSRGIASFVCEYASPGKATEVRVTVLRQADSQVTEVCAATYMMGNELTFPDDSICTGTSSGNQVNLTIQGLRAMDTGLYICKVEQMYPPPYLLGIGNGTQIYVIDPEPCPDSD

SEQ ID NO: 8 - protein, 126 aa, Artificial Sequence
  L98Q/Y105L ECD
KAMHVAQPAVVLASSRGIASFVCEYASPGKATEVRVTVLRQADSQVTEVCAATYMMGNELTFLDDSICTGTSSGNQVNLTIQGLRAMDTGLYICKVEQMYPPPYLLGIGNGTQIYVIDPEPCPDSD

SEQ ID NO: 9 - protein, 126 aa, Artificial Sequence
  L63P ECD
KAMHVAQPAVVLASSRGIASFVCEYASPGKATEVRVTVLRQADSQVTEVCAATYMMGNELTFPDDSICTGTSSGNQVNLTIQGLRAMDTGLYICKVELMYPPPYYLGIGNGTQIYVIDPEPCPDSD

SEQ ID NO: 10 - protein, 126 aa, Artificial Sequence
  L98R/N110K ECD
KAMHVAQPAVVLASSRGIASFVCEYASPGKATEVRVTVLRQADSQVTEVCAATYMMGNELTFLDDSICTGTSSGNQVNLTIQGLRAMDTGLYICKVERMYPPPYYLGIGKGTQIYVIDPEPCPDSD

SEQ ID NO: 11 - protein, 126 aa, Artificial Sequence
  L12P/A26T/L63P/L98Q/M99L/Y105L ECD
KAMHVAQPAVVPASSRGIASFVCEYTSPGKATEVRVTVLRQADSQVTEVCAATYMMGNELTFPDDSICTGTSSGNQVNLTIQGLRAMDTGLYICKVEQLYPPPYLLGIGNGTQIYVIDPEPCPDSD

SEQ ID NO: 12 - protein, 126 aa, Artificial Sequence
  E33M/Q82H/L98Q/M99L/Y105L ECD
KAMHVAQPAVVLASSRGIASFVCEYASPGKATMVRVTVLRQADSQVTEVCAATYMMGNELTFLDDSICTGTSSGNQVNLTIHGLRAMDTGLYICKVEQLYPPPYLLGIGNGTQIYVIDPEPCPDSD

SEQ ID NO: 13 - protein, 126 aa, Artificial Sequence
  L63P/S72G/L98Q/M99L/Y105L ECD
KAMHVAQPAVVLASSRGIASFVCEYASPGKATEVRVTVLRQADSQVTEVCAATYMMGNELTFPDDSICTGTGSGNQVNLTIQGLRAMDTGLYICKVEQLYPPPYLLGIGNGTQIYVIDPEPCPDSD

SEQ ID NO: 14 - protein, 126 aa, Artificial Sequence
  S14N/R16C/I18T/M56K/T61A/L63P/A86T/M99L ECD
KAMHVAQPAVVLANSCGTASFVCEYASPGKATEVRVTVLRQADSQVTEVCAATYMKGNELAFPDDSICTGTSSGNQVNLTIQGLRTMDTGLYICKVELLYPPPYYLGIGNGTQIYVIDPEPCPDSD

SEQ ID NO: 15 - protein, 126 aa, Artificial Sequence
  S27P/M56K/L63P/S72G/S73R/T89A/M99L/Y105L/I117M ECD
KAMHVAQPAVVLASSRGIASFVCEYAPPGKATEVRVTVLRQADSQVTEVCAATYMKGNELTFPDDSICTGTGRGNQVNLTIQGLRAMDAGLYICKVELLYPPPYLLGIGNGTQIYVMDPEPCPDSD

SEQ ID NO: 16 - protein, 126 aa, Artificial Sequence
  M56K/L63P/N75D/V96I/M99L/Y105L/L106I ECD
KAMHVAQPAVVLASSRGIASFVCEYASPGKATEVRVTVLRQADSQVTEVCAATYMKGNELTFPDDSICTGTSSGDQVNLTIQGLRAMDTGLYICKIELLYPPPYLIGIGNGTQIYVIDPEPCPDSD

SEQ ID NO: 17 - protein, 126 aa, Artificial Sequence
  L63P/S72G/Y105L ECD
KAMHVAQPAVVLASSRGIASFVCEYASPGKATEVRVTVLRQADSQVTEVCAATYMMGNELTFPDDSICTGTGSGNQVNLTIQGLRAMDTGLYICKVELMYPPPYLLGIGNGTQIYVIDPEPCPDSD

SEQ ID NO: 18 - protein, 126 aa, Artificial Sequence
  L63P/L98Q/M99L/Y105L/I117M ECD
KAMHVAQPAVVLASSRGIASFVCEYASPGKATEVRVTVLRQADSQVTEVCAATYMMGNELTFPDDSICTGTSSGNQVNLTIQGLRAMDTGLYICKVEQLYPPPYLLGIGNGTQIYVMDPEPCPDSD

SEQ ID NO: 19 - protein, 126 aa, Artificial Sequence
  L63P/S72G/L98Q/M99L/Y105L/L106I/I117L ECD
KAMHVAQPAVVLASSRGIASFVCEYASPGKATEVRVTVLRQADSQVTEVCAATYMMGNELTFPDDSICTGTGSGNQVNLTIQGLRAMDTGLYICKVEQLYPPPYLIGIGNGTQIYVLDPEPCPDSD

SEQ ID NO: 20 - protein, 126 aa, Artificial Sequence
  A26T/L63P/S72G/L98Q/Y105L/L106I/I117L ECD
KAMHVAQPAVVLASSRGIASFVCEYTSPGKATEVRVTVLRQADSQVTEVCAATYMMGNELTFPDDSICTGTGSGNQVNLTIQGLRAMDTGLYICKVEQMYPPPYLIGIGNGTQIYVLDPEPCPDSD

SEQ ID NO: 21 - protein, 126 aa, Artificial Sequence
  L63P/L98Q/V116A ECD
KAMHVAQPAVVLASSRGIASFVCEYASPGKATEVRVTVLRQADSQVTEVCAATYMMGNELTFPDDSICTGTSSGNQVNLTIQGLRAMDTGLYICKVEQMYPPPYYLGIGNGTQIYAIDPEPCPDSD

SEQ ID NO: 22 - protein, 126 aa, Artificial Sequence
  G29W/L98Q/M99L/Y105L ECD
KAMHVAQPAVVLASSRGIASFVCEYASPWKATEVRVTVLRQADSQVTEVCAATYMMGNELTFLDDSICTGTSSGNQVNLTIQGLRAMDTGLYICKVEQLYPPPYLLGIGNGTQIYVIDPEPCPDSD

SEQ ID NO: 23 - protein, 126 aa, Artificial Sequence
  T37S/M56V/L98Q/Y105L ECD
KAMHVAQPAVVLASSRGIASFVCEYASPGKATEVRVSVLRQADSQVTEVCAATYMVGNELTFLDDSICTGTSSGNQVNLTIQGLRAMDTGLYICKVEQMYPPPYLLGIGNGTQIYVIDPEPCPDSD

SEQ ID NO: 24 - protein, 126 aa, Artificial Sequence
  A26T/Y54F/M56K/M99L/Y105L ECD
KAMHVAQPAVVLASSRGIASFVCEYTSPGKATEVRVTVLRQADSQVTEVCAATFMKGNELTFLDDSICTGTSSGNQVNLTIQGLRAMDTGLYICKVELLYPPPYLLGIGNGTQIYVIDPEPCPDSD

SEQ ID NO: 25 - protein, 126 aa, Artificial Sequence
  L12P/I18T/A26T/M55T/T69S/S72G/M99L/Y105L ECD
KAMHVAQPAVVPASSRGTASFVCEYTSPGKATEVRVTVLRQADSQVTEVCAATYTMGNELTFLDDSICSGTGSGNQVNLTIQGLRAMDTGLYICKVELLYPPPYLLGIGNGTQIYVIDPEPCPDSD

SEQ ID NO: 26 - protein, 126 aa, Artificial Sequence
  V22I/L63P/L98Q/Y105L/I117M ECD
KAMHVAQPAVVLASSRGIASFICEYASPGKATEVRVTVLRQADSQVTEVCAATYMMGNELTFPDDSICTGTSSGNQVNLTIQGLRAMDTGLYICKVEQMYPPPYLLGIGNGTQIYVMDPEPCPDSD

SEQ ID NO: 27 - protein, 126 aa, Artificial Sequence
  A26T/L63P/S72G/L98Q/M99L/Y105L ECD
KAMHVAQPAVVLASSRGIASFVCEYTSPGKATEVRVTVLRQADSQVTEVCAATYMMGNELTFPDDSICTGTGSGNQVNLTIQGLRAMDTGLYICKVEQLYPPPYLLGIGNGTQIYVIDPEPCPDSD

SEQ ID NO: 28 - protein, 126 aa, Artificial Sequence
  E33M/A42T/L98Q/Y105L ECD
KAMHVAQPAVVLASSRGIASFVCEYASPGKATMVRVTVLRQTDSQVTEVCAATYMMGNELTFLDDSICTGTSSGNQVNLTIQGLRAMDTGLYICKVEQMYPPPYLLGIGNGTQIYVIDPEPCPDSD

SEQ ID NO: 29 - protein, 126 aa, Artificial Sequence
  M55T/E97Q/M99L/Y105F ECD
KAMHVAQPAVVLASSRGIASFVCEYASPGKATEVRVTVLRQADSQVTEVCAATYTMGNELTFLDDSICTGTSSGNQVNLTIQGLRAMDTGLYICKVQLLYPPPYFLGIGNGTQIYVIDPEPCPDSD

SEQ ID NO: 30 - protein, 126 aa, Artificial Sequence
  M55T/S72G/L98Q/M99L/Y105L ECD
KAMHVAQPAVVLASSRGIASFVCEYASPGKATEVRVTVLRQADSQVTEVCAATYTMGNELTFLDDSICTGTGSGNQVNLTIQGLRAMDTGLYICKVEQLYPPPYLLGIGNGTQIYVIDPEPCPDSD

SEQ ID NO: 31 - protein, 126 aa, Artificial Sequence
  R16C/G29W/E33V/M55T/L63P/L98Q/Y105L ECD
KAMHVAQPAVVLASSCGIASFVCEYASPWKATVVRVTVLRQADSQVTEVCAATYTMGNELTFPDDSICTGTSSGNQVNLTIQGLRAMDTGLYICKVEQMYPPPYLLGIGNGTQIYVIDPEPCPDSD

SEQ ID NO: 32 - protein, 126 aa, Artificial Sequence
  L12P/A26T/L63P/L98Q/Y105L/L106I ECD
KAMHVAQPAVVPASSRGIASFVCEYTSPGKATEVRVTVLRQADSQVTEVCAATYMMGNELTFPDDSICTGTSSGNQVNLTIQGLRAMDTGLYICKVEQMYPPPYLIGIGNGTQIYVIDPEPCPDSD

SEQ ID NO: 33 - protein, 126 aa, Artificial Sequence
  M56L/L63P/L98Q/Y105L/L106I/I117L ECD
KAMHVAQPAVVLASSRGIASFVCEYASPGKATEVRVTVLRQADSQVTEVCAATYMLGNELTFPDDSICTGTSSGNQVNLTIQGLRAMDTGLYICKVEQMYPPPYLIGIGNGTQIYVLDPEPCPDSD

SEQ ID NO: 34 - protein, 126 aa, Artificial Sequence
  S15P/I18V/M56T/L98Q/M99L/Y105L ECD
KAMHVAQPAVVLASPRGVASFVCEYASPGKATEVRVTVLRQADSQVTEVCAATYMTGNELTFLDDSICTGTSSGNQVNLTIQGLRAMDTGLYICKVEQLYPPPYLLGIGNGTQIYVIDPEPCPDSD

SEQ ID NO: 35 - protein, 126 aa, Artificial Sequence
  I18T/G29W/L63P/L98Q/Y105L ECD
KAMHVAQPAVVLASSRGTASFVCEYASPWKATEVRVTVLRQADSQVTEVCAATYMMGNELTFPDDSICTGTSSGNQVNLTIQGLRAMDTGLYICKVEQMYPPPYLLGIGNGTQIYVIDPEPCPDSD

SEQ ID NO: 36 - protein, 126 aa, Artificial Sequence
  L63P/Q82H/L98Q/M99L/Y105L ECD
KAMHVAQPAVVLASSRGIASFVCEYASPGKATEVRVTVLRQADSQVTEVCAATYMMGNELTFPDDSICTGTSSGNQVNLTIHGLRAMDTGLYICKVEQLYPPPYLLGIGNGTQIYVIDPEPCPDSD

SEQ ID NO: 37 - protein, 126 aa, Artificial Sequence
  L98Q/M99L/Y105L/L106I/I117T ECD
KAMHVAQPAVVLASSRGIASFVCEYASPGKATEVRVTVLRQADSQVTEVCAATYMMGNELTFLDDSICTGTSSGNQVNLTIQGLRAMDTGLYICKVEQLYPPPYLIGIGNGTQIYVTDPEPCPDSD

SEQ ID NO: 38 - protein, 126 aa, Artificial Sequence
  L98Q/M99L/Y105L/L106I/Y115N ECD
KAMHVAQPAVVLASSRGIASFVCEYASPGKATEVRVTVLRQADSQVTEVCAATYMMGNELTFLDDSICTGTSSGNQVNLTIQGLRAMDTGLYICKVEQLYPPPYLIGIGNGTQINVIDPEPCPDSD

SEQ ID NO: 39 - protein, 126 aa, Artificial Sequence
  M55T/L63P/T71I/M99L/Y105L ECD
KAMHVAQPAVVLASSRGIASFVCEYASPGKATEVRVTVLRQADSQVTEVCAATYTMGNELTFPDDSICTGISSGNQVNLTIQGLRAMDTGLYICKVELLYPPPYLLGIGNGTQIYVIDPEPCPDSD

SEQ ID NO: 40 - protein, 126 aa, Artificial Sequence
  A26T/T53S/M56K/L63P/L98Q/Y105L ECD
KAMHVAQPAVVLASSRGIASFVCEYTSPGKATEVRVTVLRQADSQVTEVCAASYMKGNELTFPDDSICTGTSSGNQVNLTIQGLRAMDTGLYICKVEQMYPPPYLLGIGNGTQIYVIDPEPCPDSD

SEQ ID NO: 41 - protein, 126 aa, Artificial Sequence
  I18T/A26T/L63P/Q82R/L98Q/Y105L ECD
KAMHVAQPAVVLASSRGTASFVCEYTSPGKATEVRVTVLRQADSQVTEVCAATYMMGNELTFPDDSICTGTSSGNQVNLTIRGLRAMDTGLYICKVEQMYPPPYLLGIGNGTQIYVIDPEPCPDSD

SEQ ID NO: 42 - protein, 126 aa, Artificial Sequence
  L12H/M55T/E59D/L63P/M99L ECD
KAMHVAQPAVVHASSRGIASFVCEYASPGKATEVRVTVLRQADSQVTEVCAATYTMGNDLTFPDDSICTGTSSGNQVNLTIQGLRAMDTGLYICKVELLYPPPYYLGIGNGTQIYVIDPEPCPDSD

SEQ ID NO: 43 - protein, 126 aa, Artificial Sequence
  I18T/L63P/S72G/L98Q/Y105L/I108V ECD
KAMHVAQPAVVLASSRGTASFVCEYASPGKATEVRVTVLRQADSQVTEVCAATYMMGNELTFPDDSICTGTGSGNQVNLTIQGLRAMDTGLYICKVEQMYPPPYLLGVGNGTQIYVIDPEPCPDSD

SEQ ID NO: 44 - protein, 126 aa, Artificial Sequence [sequence omitted]

SEQ ID NO: 45 - protein, 126 aa, Artificial Sequence
  T61A/L63P/S72G/L98Q/M99L/Y105L ECD
KAMHVAQPAVVLASSRGIASFVCEYASPGKATEVRVTVLRQADSQVTEVCAATYMMGNELAFPDDSICTGTGSGNQVNLTIQGLRAMDTGLYICKVEQLYPPPYLLGIGNGTQIYVIDPEPCPDSD

SEQ ID NO: 46 - protein, 126 aa, Artificial Sequence
  V38I/L63P/S72G/L98Q/M99L/Y105L ECD
KAMHVAQPAVVLASSRGIASFVCEYASPGKATEVRVTILRQADSQVTEVCAATYMMGNELTFPDDSICTGTGSGNQVNLTIQGLRAMDTGLYICKVEQLYPPPYLLGIGNGTQIYVIDPEPCPDSD

SEQ ID NO: 47 - protein, 126 aa, Artificial Sequence
  L63P/S72G/I93L/L98Q/M99L/Y105L ECD
KAMHVAQPAVVLASSRGIASFVCEYASPGKATEVRVTVLRQADSQVTEVCAATYMMGNELTFPDDSICTGTGSGNQVNLTIQGLRAMDTGLYLCKVEQLYPPPYLLGIGNGTQIYVIDPEPCPDSD

SEQ ID NO: 48 - protein, 126 aa, Artificial Sequence
  L12I/M55T/M56V/I67T/M99L/L106R/I108F ECD
KAMHVAQPAVVIASSRGIASFVCEYASPGKATEVRVTVLRQADSQVTEVCAATYTVGNELTFLDDSTCTGTSSGNQVNLTIQGLRAMDTGLYICKVELLYPPPYYRGFGNGTQIYVIDPEPCPDSD

SEQ ID NO: 49 - protein, 126 aa, Artificial Sequence
  I18N/A26T/L63H/T89A/L98Q/M99L/Y105L ECD
KAMHVAQPAVVLASSRGNASFVCEYTSPGKATEVRVTVLRQADSQVTEVCAATYMMGNELTFHDDSICTGTSSGNQVNLTIQGLRAMDAGLYICKVEQLYPPPYLLGIGNGTQIYVIDPEPCPDSD

SEQ ID NO: 50 - protein, 126 aa, Artificial Sequence
  I18T/E48R/L63P/T69S/L98Q/Y105L/N110Y ECD
KAMHVAQPAVVLASSRGTASFVCEYASPGKATEVRVTVLRQADSQVTRVCAATYMMGNELTFPDDSICSGTSSGNQVNLTIQGLRAMDTGLYICKVEQMYPPPYLLGIGYGTQIYVIDPEPCPDSD

SEQ ID NO: 51 - protein, 126 aa, Artificial Sequence
  I18N/L63P/S72T/M87T/L98Q/Y105L/N110S ECD
KAMHVAQPAVVLASSRGNASFVCEYASPGKATEVRVTVLRQADSQVTEVCAATYMMGNELTFPDDSICTGTTSGNQVNLTIQGLRATDTGLYICKVEQMYPPPYLLGIGSGTQIYVIDPEPCPDSD

SEQ ID NO: 52 - protein, 126 aa, Artificial Sequence
  G29W/M56T/L63P/L98Q/Y105L/L106I/I117L ECD
KAMHVAQPAVVLASSRGIASFVCEYASPWKATEVRVTVLRQADSQVTEVCAATYMTGNELTFPDDSICTGTSSGNQVNLTIQGLRAMDTGLYICKVEQMYPPPYLIGIGNGTQIYVLDPEPCPDSD

SEQ ID NO: 53 - protein, 126 aa, Artificial Sequence
  G29W/N58S/L63P/M87T/L98Q/M99L/Y105L ECD
KAMHVAQPAVVLASSRGIASFVCEYASPWKATEVRVTVLRQADSQVTEVCAATYMMGSELTFPDDSICTGTSSGNQVNLTIQGLRATDTGLYICKVEQLYPPPYLLGIGNGTQIYVIDPEPCPDSD

SEQ ID NO: 54 - protein, 126 aa, Artificial Sequence
  G29W/N58S/L63P/D64N/L98Q/M99L/Y105L ECD
KAMHVAQPAVVLASSRGIASFVCEYASPWKATEVRVTVLRQADSQVTEVCAATYMMGSELTFPNDSICTGTSSGNQVNLTIQGLRAMDTGLYICKVEQLYPPPYLLGIGNGTQIYVIDPEPCPDSD

SEQ ID NO: 55 - protein, 126 aa, Artificial Sequence
  I18T/L63P/S72G/M87K/L98Q/M99L/Y105L ECD
KAMHVAQPAVVLASSRGTASFVCEYASPGKATEVRVTVLRQADSQVTEVCAATYMMGNELTFPDDSICTGTGSGNQVNLTIQGLRAKDTGLYICKVEQLYPPPYLLGIGNGTQIYVIDPEPCPDSD

SEQ ID NO: 56 - protein, 126 aa, Artificial Sequence
  M56V ECD
KAMHVAQPAVVLASSRGIASFVCEYASPGKATEVRVTVLRQADSQVTEVCAATYMVGNELTFLDDSICTGTSSGNQVNLTIQGLRAMDTGLYICKVELMYPPPYYLGIGNGTQIYVIDPEPCPDSD

SEQ ID NO: 57 - protein, 126 aa, Artificial Sequence
  L63P/K95R ECD
KAMHVAQPAVVLASSRGIASFVCEYASPGKATEVRVTVLRQADSQVTEVCAATYMMGNELTFPDDSICTGTSSGNQVNLTIQGLRAMDTGLYICRVELMYPPPYYLGIGNGTQIYVIDPEPCPDSD

SEQ ID NO: 58 - protein, 126 aa, Artificial Sequence
  L63P/L98Q ECD
KAMHVAQPAVVLASSRGIASFVCEYASPGKATEVRVTVLRQADSQVTEVCAATYMMGNELTFPDDSICTGTSSGNQVNLTIQGLRAMDTGLYICKVEQMYPPPYYLGIGNGTQIYVIDPEPCPDSD

SEQ ID NO: 59 - protein, 126 aa, Artificial Sequence
  L98Q/M99L/Y105L ECD
KAMHVAQPAVVLASSRGIASFVCEYASPGKATEVRVTVLRQADSQVTEVCAATYMMGNELTFLDDSICTGTSSGNQVNLTIQGLRAMDTGLYICKVEQLYPPPYLLGIGNGTQIYVIDPEPCPDSD

SEQ ID NO: 60 - protein, 126 aa, Artificial Sequence
  L63P/M87K/M99L/L106R ECD
KAMHVAQPAVVLASSRGIASFVCEYASPGKATEVRVTVLRQADSQVTEVCAATYMMGNELTFPDDSICTGTSSGNQVNLTIQGLRAKDTGLYICKVELLYPPPYYRGIGNGTQIYVIDPEPCPDSD

SEQ ID NO: 61 - protein, 126 aa, Artificial Sequence
  L63P/M99L/Y105L/I108F ECD
KAMHVAQPAVVLASSRGIASFVCEYASPGKATEVRVTVLRQADSQVTEVCAATYMMGNELTFPDDSICTGTSSGNQVNLTIQGLRAMDTGLYICKVELLYPPPYLLGFGNGTQIYVIDPEPCPDSD

SEQ ID NO: 62 - protein, 126 aa, Artificial Sequence
  V10A/L63P/L98Q/Y105L ECD
KAMHVAQPAAVLASSRGIASFVCEYASPGKATEVRVTVLRQADSQVTEVCAATYMMGNELTFPDDSICTGTSSGNQVNLTIQGLRAMDTGLYICKVEQMYPPPYLLGIGNGTQIYVIDPEPCPDSD

SEQ ID NO: 63 - protein, 126 aa, Artificial Sequence
  M56T/L91R/L98Q/Y105L ECD
KAMHVAQPAVVLASSRGIASFVCEYASPGKATEVRVTVLRQADSQVTEVCAATYMTGNELTFLDDSICTGTSSGNQVNLTIQGLRAMDTGRYICKVEQMYPPPYLLGIGNGTQIYVIDPEPCPDSD

SEQ ID NO: 64 - protein, 126 aa, Artificial Sequence
  A26T/L63P/M87V/N110K/I117E ECD
KAMHVAQPAVVLASSRGIASFVCEYTSPGKATEVRVTVLRQADSQVTEVCAATYMMGNELTFPDDSICTGTSSGNQVNLTIQGLRAVDTGLYICKVELMYPPPYYLGIGKGTQIYVEDPEPCPDSD

SEQ ID NO: 65 - protein, 126 aa, Artificial Sequence
  G29W/L63P/L98Q/M99L/Y105L ECD
KAMHVAQPAVVLASSRGIASFVCEYASPWKATEVRVTVLRQADSQVTEVCAATYMMGNELTFPDDSICTGTSSGNQVNLTIQGLRAMDTGLYICKVEQLYPPPYLLGIGNGTQIYVIDPEPCPDSD

SEQ ID NO: 66 - protein, 126 aa, Artificial Sequence
  A26T/V46E/L63P/D65G/L98Q ECD
KAMHVAQPAVVLASSRGIASFVCEYTSPGKATEVRVTVLRQADSQETEVCAATYMMGNELTFPDGSICTGTSSGNQVNLTIQGLRAMDTGLYICKVEQMYPPPYYLGIGNGTQIYVIDPEPCPDSD

SEQ ID NO: 67 - protein, 126 aa, Artificial Sequence
  G29W/N58S/L63P/L98Q/Y105L ECD
KAMHVAQPAVVLASSRGIASFVCEYASPWKATEVRVTVLRQADSQVTEVCAATYMMGSELTFPDDSICTGTSSGNQVNLTIQGLRAMDTGLYICKVEQMYPPPYLLGIGNGTQIYVIDPEPCPDSD

SEQ ID NO: 68 - protein, 126 aa, Artificial Sequence
  G29W/E59G/L63P/L98Q/Y105L ECD
KAMHVAQPAVVLASSRGIASFVCEYASPWKATEVRVTVLRQADSQVTEVCAATYMMGNGLTFPDDSICTGTSSGNQVNLTIQGLRAMDTGLYICKVEQMYPPPYLLGIGNGTQIYVIDPEPCPDSD

SEQ ID NO: 69 - protein, 126 aa, Artificial Sequence
  L12H/L63P/S72G/L98Q/Y105L ECD
KAMHVAQPAVVHASSRGIASFVCEYASPGKATEVRVTVLRQADSQVTEVCAATYMMGNELTFPDDSICTGTGSGNQVNLTIQGLRAMDTGLYICKVEQMYPPPYLLGIGNGTQIYVIDPEPCPDSD

SEQ ID NO: 70 - protein, 126 aa, Artificial Sequence
  A6T/A26T/M55T/M99L/Y105L ECD
KAMHVTQPAVVLASSRGIASFVCEYTSPGKATEVRVTVLRQADSQVTEVCAATYTMGNELTFLDDSICTGTSSGNQVNLTIQGLRAMDTGLYICKVELLYPPPYLLGIGNGTQIYVIDPEPCPDSD

SEQ ID NO: 71 - protein, 126 aa, Artificial Sequence
  A26T/L63P/D65G/L98Q/M99L/Y105L ECD
KAMHVAQPAVVLASSRGIASFVCEYTSPGKATEVRVTVLRQADSQVTEVCAATYMMGNELTFPDGSICTGTSSGNQVNLTIQGLRAMDTGLYICKVEQLYPPPYLLGIGNGTQIYVIDPEPCPDSD

SEQ ID NO: 72 - protein, 126 aa, Artificial Sequence
  V10A/L63P/D64V/S72G/L98Q/M99L/Y105L ECD
KAMHVAQPAAVLASSRGIASFVCEYASPGKATEVRVTVLRQADSQVTEVCAATYMMGNELTFPVDSICTGTGSGNQVNLTIQGLRAMDTGLYICKVEQLYPPPYLLGIGNGTQIYVIDPEPCPDSD

SEQ ID NO: 73 - protein, 126 aa, Artificial Sequence
  L12P/G29W/D43N/N58S/L63P/L98Q/M99L/Y105L ECD
KAMHVAQPAVVPASSRGIASFVCEYASPWKATEVRVTVLRQANSQVTEVCAATYMMGSELTFPDDSICTGTSSGNQVNLTIQGLRAMDTGLYICKVEQLYPPPYLLGIGNGTQIYVIDPEPCPDSD

SEQ ID NO: 74 - protein, 126 aa, Artificial Sequence
  I18V/A26T/L63P/D64E/L98Q/Y105L/L106R/N110K ECD
KAMHVAQPAVVLASSRGVASFVCEYTSPGKATEVRVTVLRQADSQVTEVCAATYMMGNELTFPEDSICTGTSSGNQVNLTIQGLRAMDTGLYICKVEQMYPPPYLRGIGKGTQIYVIDPEPCPDSD

SEQ ID NO: 75 - protein, 126 aa, Artificial Sequence
  A19V/G29W/R35K/L63P/L98Q/M99L/Y105L ECD
KAMHVAQPAVVLASSRGIVSFVCEYASPWKATEVKVTVLRQADSQVTEVCAATYMMGNELTFPDDSICTGTSSGNQVNLTIQGLRAMDTGLYICKVEQLYPPPYLLGIGNGTQIYVIDPEPCPDSD

SEQ ID NO: 76 - protein, 126 aa, Artificial Sequence
  L12P/A26T/L63P/S72G/T89M/L98Q/M99L/Y105L ECD
KAMHVAQPAVVPASSRGIASFVCEYTSPGKATEVRVTVLRQADSQVTEVCAATYMMGNELTFPDDSICTGTGSGNQVNLTIQGLRAMDMGLYICKVEQLYPPPYLLGIGNGTQIYVIDPEPCPDSD

SEQ ID NO: 77 - protein, 126 aa, Artificial Sequence
  P28L/E33V/L63P/S72G/L98R/M99L/Y105L ECD
KAMHVAQPAVVLASSRGIASFVCEYASLGKATVVRVTVLRQADSQVTEVCAATYMMGNELTFPDDSICTGTGSGNQVNLTIQGLRAMDTGLYICKVERLYPPPYLLGIGNGTQIYVIDPEPCPDSD

SEQ ID NO: 78 - protein, 126 aa, Artificial Sequence
  E24Q/L63P/S72G/L98Q/M99L/Y105L ECD
KAMHVAQPAVVLASSRGIASFVCQYASPGKATEVRVTVLRQADSQVTEVCAATYMMGNELTFPDDSICTGTGSGNQVNLTIQGLRAMDTGLYICKVEQLYPPPYLLGIGNGTQIYVIDPEPCPDSD

SEQ ID NO: 79 - protein, 126 aa, Artificial Sequence
  I18T/G29R/L63P/S72G/L98Q/M99L/Y105L ECD
KAMHVAQPAVVLASSRGTASFVCEYASPRKATEVRVTVLRQADSQVTEVCAATYMMGNELTFPDDSICTGTGSGNQVNLTIQGLRAMDTGLYICKVEQLYPPPYLLGIGNGTQIYVIDPEPCPDSD

SEQ ID NO: 80 - protein, 126 aa, Artificial Sequence
  L63P/L98Q/M99L/Y105L ECD
KAMHVAQPAVVLASSRGIASFVCEYASPGKATEVRVTVLRQADSQVTEVCAATYMMGNELTFPDDSICTGTSSGNQVNLTIQGLRAMDTGLYICKVEQLYPPPYLLGIGNGTQIYVIDPEPCPDSD

SEQ ID NO: 81 - protein, 126 aa, Artificial Sequence
  Q41L/Y54F/M56K/M99L/I108F ECD
KAMHVAQPAVVLASSRGIASFVCEYASPGKATEVRVTVLRLADSQVTEVCAATFMKGNELTFLDDSICTGTSSGNQVNLTIQGLRAMDTGLYICKVELLYPPPYYLGFGNGTQIYVIDPEPCPDSD

SEQ ID NO: 82 - protein, 126 aa, Artificial Sequence
  S72G/L98Q/M99L/Y105L/I117T ECD
KAMHVAQPAVVLASSRGIASFVCEYASPGKATEVRVTVLRQADSQVTEVCAATYMMGNELTFLDDSICTGTGSGNQVNLTIQGLRAMDTGLYICKVEQLYPPPYLLGIGNGTQIYVTDPEPCPDSD

SEQ ID NO: 83 - protein, 126 aa, Artificial Sequence
  M56R/L63P/L98Q/M99L/Y105L ECD
KAMHVAQPAVVLASSRGIASFVCEYASPGKATEVRVTVLRQADSQVTEVCAATYMRGNELTFPDDSICTGTSSGNQVNLTIQGLRAMDTGLYICKVEQLYPPPYLLGIGNGTQIYVIDPEPCPDSD

SEQ ID NO: 84 - protein, 126 aa, Artificial Sequence
  E33M/L63P/S72G/L98Q/Y105L ECD
KAMHVAQPAVVLASSRGIASFVCEYASPGKATMVRVTVLRQADSQVTEVCAATYMMGNELTFPDDSICTGTGSGNQVNLTIQGLRAMDTGLYICKVEQMYPPPYLLGIGNGTQIYVIDPEPCPDSD

SEQ ID NO: 85 - protein, 126 aa, Artificial Sequence
  L63P/L98Q/M99L/Y105L/L106I ECD
KAMHVAQPAVVLASSRGIASFVCEYASPGKATEVRVTVLRQADSQVTEVCAATYMMGNELTFPDDSICTGTSSGNQVNLTIQGLRAMDTGLYICKVEQLYPPPYLIGIGNGTQIYVIDPEPCPDSD

SEQ ID NO: 86 - protein, 126 aa, Artificial Sequence
  A26T/M55R/L98Q/M99L/Y105L ECD
KAMHVAQPAVVLASSRGIASFVCEYTSPGKATEVRVTVLRQADSQVTEVCAATYRMGNELTFLDDSICTGTSSGNQVNLTIQGLRAMDTGLYICKVEQLYPPPYLLGIGNGTQIYVIDPEPCPDSD

SEQ ID NO: 87 - protein, 126 aa, Artificial Sequence
  L63P/S72G/M87A/L98Q/Y105L ECD
KAMHVAQPAVVLASSRGIASFVCEYASPGKATEVRVTVLRQADSQVTEVCAATYMMGNELTFPDDSICTGTGSGNQVNLTIQGLRAADTGLYICKVEQMYPPPYLLGIGNGTQIYVIDPEPCPDSD

SEQ ID NO: 88 - protein, 126 aa, Artificial Sequence
  A26D/S72G/L98Q/M99L/Y105L ECD
KAMHVAQPAVVLASSRGIASFVCEYDSPGKATEVRVTVLRQADSQVTEVCAATYMMGNELTFLDDSICTGTGSGNQVNLTIQGLRAMDTGLYICKVEQLYPPPYLLGIGNGTQIYVIDPEPCPDSD

SEQ ID NO: 89 - protein, 126 aa, Artificial Sequence
  V22A/L63P/L98Q/M99L/Y105L/P119H ECD
KAMHVAQPAVVLASSRGIASFACEYASPGKATEVRVTVLRQADSQVTEVCAATYMMGNELTFPDDSICTGTSSGNQVNLTIQGLRAMDTGLYICKVEQLYPPPYLLGIGNGTQIYVIDHEPCPDSD

SEQ ID NO: 90 - protein, 126 aa, Artificial Sequence
  A26T/M55T/L63P/L98Q/M99L/Y105L ECD
KAMHVAQPAVVLASSRGIASFVCEYTSPGKATEVRVTVLRQADSQVTEVCAATYTMGNELTFPDDSICTGTSSGNQVNLTIQGLRAMDTGLYICKVEQLYPPPYLLGIGNGTQIYVIDPEPCPDSD

SEQ ID NO: 91 - protein, 126 aa, Artificial Sequence
  E33V/A42S/M55T/L98Q/M99L/Y105L ECD
KAMHVAQPAVVLASSRGIASFVCEYASPGKATVVRVTVLRQSDSQVTEVCAATYTMGNELTFLDDSICTGTSSGNQVNLTIQGLRAMDTGLYICKVEQLYPPPYLLGIGNGTQIYVIDPEPCPDSD

SEQ ID NO: 92 - protein, 126 aa, Artificial Sequence
  G29W/N58S/L63P/Q82R/L98Q/Y105L ECD
KAMHVAQPAVVLASSRGIASFVCEYASPWKATEVRVTVLRQADSQVTEVCAATYMMGSELTFPDDSICTGTSSGNQVNLTIRGLRAMDTGLYICKVEQMYPPPYLLGIGNGTQIYVIDPEPCPDSD

SEQ ID NO: 93 - protein, 126 aa, Artificial Sequence
  E33M/L63P/S72G/L98Q/Y105L/I117L ECD
KAMHVAQPAVVLASSRGIASFVCEYASPGKATMVRVTVLRQADSQVTEVCAATYMMGNELTFPDDSICTGTGSGNQVNLTIQGLRAMDTGLYICKVEQMYPPPYLLGIGNGTQIYVLDPEPCPDSD

SEQ ID NO: 94 - protein, 126 aa, Artificial Sequence
  A26T/I67N/S72G/L98Q/M99L/Y105L ECD
KAMHVAQPAVVLASSRGIASFVCEYTSPGKATEVRVTVLRQADSQVTEVCAATYMMGNELTFLDDSNCTGTGSGNQVNLTIQGLRAMDTGLYICKVEQLYPPPYLLGIGNGTQIYVIDPEPCPDSD

SEQ ID NO: 95 - protein, 126 aa, Artificial Sequence
  L12F/A26T/L63P/L98Q/Y105L/L106R ECD
KAMHVAQPAVVFASSRGIASFVCEYTSPGKATEVRVTVLRQADSQVTEVCAATYMMGNELTFPDDSICTGTSSGNQVNLTIQGLRAMDTGLYICKVEQMYPPPYLRGIGNGTQIYVIDPEPCPDSD

SEQ ID NO: 96 - protein, 126 aa, Artificial Sequence
  S20N/A26T/L63P/L98Q/M99L/Y105L ECD
KAMHVAQPAVVLASSRGIANFVCEYTSPGKATEVRVTVLRQADSQVTEVCAATYMMGNELTFPDDSICTGTSSGNQVNLTIQGLRAMDTGLYICKVEQLYPPPYLLGIGNGTQIYVIDPEPCPDSD

SEQ ID NO: 97 - protein, 126 aa, Artificial Sequence
  G29W/T61I/L63P/S72G/L98Q/M99L/Y105L ECD
KAMHVAQPAVVLASSRGIASFVCEYASPWKATEVRVTVLRQADSQVTEVCAATYMMGNELIFPDDSICTGTGSGNQVNLTIQGLRAMDTGLYICKVEQLYPPPYLLGIGNGTQIYVIDPEPCPDSD

SEQ ID NO: 98 - protein, 126 aa, Artificial Sequence
  G29W/N58S/L63P/T69I/L98Q/M99L/Y105L ECD
KAMHVAQPAVVLASSRGIASFVCEYASPWKATEVRVTVLRQADSQVTEVCAATYMMGSELTFPDDSICIGTSSGNQVNLTIQGLRAMDTGLYICKVEQLYPPPYLLGIGNGTQIYVIDPEPCPDSD

SEQ ID NO: 99 - protein, 126 aa, Artificial Sequence
  L12P/L63P/S72G/L98Q/M99L/Y105L/L106N ECD
KAMHVAQPAVVPASSRGIASFVCEYASPGKATEVRVTVLRQADSQVTEVCAATYMMGNELTFPDDSICTGTGSGNQVNLTIQGLRAMDTGLYICKVEQLYPPPYLNGIGNGTQIYVIDPEPCPDSD

SEQ ID NO: 100 - protein, 126 aa, Artificial Sequence
  L63P/T69A/L98Q/M99L/Y105L/L106R/V116A ECD
KAMHVAQPAVVLASSRGIASFVCEYASPGKATEVRVTVLRQADSQVTEVCAATYMMGNELTFPDDSICAGTSSGNQVNLTIQGLRAMDTGLYICKVEQLYPPPYLRGIGNGTQIYAIDPEPCPDSD

SEQ ID NO: 101 - protein, 126 aa, Artificial Sequence
  G29W/N58S/L63P/S72G/L98Q/Y105L ECD
KAMHVAQPAVVLASSRGIASFVCEYASPWKATEVRVTVLRQADSQVTEVCAATYMMGSELTFPDDSICTGTGSGNQVNLTIQGLRAMDTGLYICKVEQMYPPPYLLGIGNGTQIYVIDPEPCPDSD

SEQ ID NO: 102 - protein, 126 aa, Artificial Sequence
  G29W/L63P/D65G/S72G/L98Q/Y105L ECD
KAMHVAQPAVVLASSRGIASFVCEYASPWKATEVRVTVLRQADSQVTEVCAATYMMGNELTFPDGSICTGTGSGNQVNLTIQGLRAMDTGLYICKVEQMYPPPYLLGIGNGTQIYVIDPEPCPDSD

SEQ ID NO: 103 - protein, 126 aa, Artificial Sequence
  T53S/M56V/L98Q/Y105L ECD
KAMHVAQPAVVLASSRGIASFVCEYASPGKATEVRVTVLRQADSQVTEVCAASYMVGNELTFLDDSICTGTSSGNQVNLTIQGLRAMDTGLYICKVEQMYPPPYLLGIGNGTQIYVIDPEPCPDSD

SEQ ID NO: 104 - protein, 126 aa, Artificial Sequence
  L63P/S72G/L98Q/Y105L ECD
KAMHVAQPAVVLASSRGIASFVCEYASPGKATEVRVTVLRQADSQVTEVCAATYMMGNELTFPDDSICTGTGSGNQVNLTIQGLRAMDTGLYICKVEQMYPPPYLLGIGNGTQIYVIDPEPCPDSD

SEQ ID NO: 105 - protein, 126 aa, Artificial Sequence
  I18A/L63P/S72G/L98Q/Y105L ECD
KAMHVAQPAVVLASSRGAASFVCEYASPGKATEVRVTVLRQADSQVTEVCAATYMMGNELTFPDDSICTGTGSGNQVNLTIQGLRAMDTGLYICKVEQMYPPPYLLGIGNGTQIYVIDPEPCPDSD

SEQ ID NO: 106 - protein, 126 aa, Artificial Sequence
  G29W/T53S/M56K/L63P/L98Q/Y105L ECD
KAMHVAQPAVVLASSRGIASFVCEYASPWKATEVRVTVLRQADSQVTEVCAASYMKGNELTFPDDSICTGTSSGNQVNLTIQGLRAMDTGLYICKVEQMYPPPYLLGIGNGTQIYVIDPEPCPDSD

SEQ ID NO: 107 - protein, 126 aa, Artificial Sequence
  I18V/G29W/L63P/S72G/L98Q/Y105L ECD
KAMHVAQPAVVLASSRGVASFVCEYASPWKATEVRVTVLRQADSQVTEVCAATYMMGNELTFPDDSICTGTGSGNQVNLTIQGLRAMDTGLYICKVEQMYPPPYLLGIGNGTQIYVIDPEPCPDSD

SEQ ID NO: 108 - protein, 126 aa, Artificial Sequence
  G29W/L63P/S72G/L98Q/Y105L/L106I ECD
KAMHVAQPAVVLASSRGIASFVCEYASPWKATEVRVTVLRQADSQVTEVCAATYMMGNELTFPDDSICTGTGSGNQVNLTIQGLRAMDTGLYICKVEQMYPPPYLIGIGNGTQIYVIDPEPCPDSD

SEQ ID NO: 109 - protein, 126 aa, Artificial Sequence
  G29W/L63P/I67V/S72G/L98Q/Y105L ECD
KAMHVAQPAVVLASSRGIASFVCEYASPWKATEVRVTVLRQADSQVTEVCAATYMMGNELTFPDDSVCTGTGSGNQVNLTIQGLRAMDTGLYICKVEQMYPPPYLLGIGNGTQIYVIDPEPCPDSD

SEQ ID NO: 110 - protein, 126 aa, Artificial Sequence
  G29W/M55V/E59G/L63P/L98Q/Y105L ECD
KAMHVAQPAVVLASSRGIASFVCEYASPWKATEVRVTVLRQADSQVTEVCAATYVMGNGLTFPDDSICTGTSSGNQVNLTIQGLRAMDTGLYICKVEQMYPPPYLLGIGNGTQIYVIDPEPCPDSD

SEQ ID NO: 111 - protein, 126 aa, Artificial Sequence
  G29W/L63P/S72G/L98Q/Y105L/I117L ECD
KAMHVAQPAVVLASSRGIASFVCEYASPWKATEVRVTVLRQADSQVTEVCAATYMMGNELTFPDDSICTGTGSGNQVNLTIQGLRAMDTGLYICKVEQMYPPPYLLGIGNGTQIYVLDPEPCPDSD

SEQ ID NO: 112 - protein, 126 aa, Artificial Sequence
  L63P/S72G/L98Q/Y105L/L106I/I117L ECD
KAMHVAQPAVVLASSRGIASFVCEYASPGKATEVRVTVLRQADSQVTEVCAATYMMGNELTFPDDSICTGTGSGNQVNLTIQGLRAMDTGLYICKVEQMYPPPYLIGIGNGTQIYVLDPEPCPDSD

SEQ ID NO: 113 - protein, 126 aa, Artificial Sequence
  L12F/R16H/G29W/M56T/L98Q/Y105L ECD
KAMHVAQPAVVFASSHGIASFVCEYASPWKATEVRVTVLRQADSQVTEVCAATYMTGNELTFLDDSICTGTSSGNQVNLTIQGLRAMDTGLYICKVEQMYPPPYLLGIGNGTQIYVIDPEPCPDSD

SEQ ID NO: 114 - protein, 126 aa, Artificial Sequence
  L12P/G29W/L63P/S72G/L98Q/Y105L ECD
KAMHVAQPAVVPASSRGIASFVCEYASPWKATEVRVTVLRQADSQVTEVCAATYMMGNELTFPDDSICTGTGSGNQVNLTIQGLRAMDTGLYICKVEQMYPPPYLLGIGNGTQIYVIDPEPCPDSD

SEQ ID NO: 115 - protein, 126 aa, Artificial Sequence
  L12P/G29W/L63P/S72G/L98Q/Y105L/L106I ECD
KAMHVAQPAVVPASSRGIASFVCEYASPWKATEVRVTVLRQADSQVTEVCAATYMMGNELTFPDDSICTGTGSGNQVNLTIQGLRAMDTGLYICKVEQMYPPPYLIGIGNGTQIYVIDPEPCPDSD

SEQ ID NO: 116 - protein, 126 aa, Artificial Sequence
  G29W/L63P/S72G/L98Q/Y105L/L106I/I117L ECD
KAMHVAQPAVVLASSRGIASFVCEYASPWKATEVRVTVLRQADSQVTEVCAATYMMGNELTFPDDSICTGTGSGNQVNLTIQGLRAMDTGLYICKVEQMYPPPYLIGIGNGTQIYVLDPEPCPDSD

SEQ ID NO: 117 - protein, 126 aa, Artificial Sequence
  G29W/N58S/L63P/S72G/L98Q/Y105L/L106I ECD
KAMHVAQPAVVLASSRGIASFVCEYASPWKATEVRVTVLRQADSQVTEVCAATYMMGSELTFPDDSICTGTGSGNQVNLTIQGLRAMDTGLYICKVEQMYPPPYLIGIGNGTQIYVIDPEPCPDSD

SEQ ID NO: 118 - protein, 126 aa, Artificial Sequence
  A26T/T53S/L63P/L98Q/Y105L/L106I/I117L ECD
KAMHVAQPAVVLASSRGIASFVCEYTSPGKATEVRVTVLRQADSQVTEVCAASYMMGNELTFPDDSICTGTSSGNQVNLTIQGLRAMDTGLYICKVEQMYPPPYLIGIGNGTQIYVLDPEPCPDSD

SEQ ID NO: 119 - protein, 126 aa, Artificial Sequence
  G29W/N58S/L63P/S72G/M87V/L98Q/Y105L ECD
KAMHVAQPAVVLASSRGIASFVCEYASPWKATEVRVTVLRQADSQVTEVCAATYMMGSELTFPDDSICTGTGSGNQVNLTIQGLRAVDTGLYICKVEQMYPPPYLLGIGNGTQIYVIDPEPCPDSD

SEQ ID NO: 120 - protein, 126 aa, Artificial Sequence
  G29W/S72G/Q76R/L98Q/Y105L/L106I/Q113H ECD
KAMHVAQPAVVLASSRGIASFVCEYASPWKATEVRVTVLRQADSQVTEVCAATYMMGNELTFLDDSICTGTGSGNRVNLTIQGLRAMDTGLYICKVEQMYPPPYLIGIGNGTHIYVIDPEPCPDSD

SEQ ID NO: 121 - protein, 126 aa, Artificial Sequence
  G29W/N58S/L63P/S72G/L98Q/Y105L/L106V ECD
KAMHVAQPAVVLASSRGIASFVCEYASPWKATEVRVTVLRQADSQVTEVCAATYMMGSELTFPDDSICTGTGSGNQVNLTIQGLRAMDTGLYICKVEQMYPPPYLVGIGNGTQIYVIDPEPCPDSD

SEQ ID NO: 122 - protein, 126 aa, Artificial Sequence
  A26T/L63P/L98Q/M99L/Y105L ECD
KAMHVAQPAVVLASSRGIASFVCEYTSPGKATEVRVTVLRQADSQVTEVCAATYMMGNELTFPDDSICTGTSSGNQVNLTIQGLRAMDTGLYICKVEQLYPPPYLLGIGNGTQIYVIDPEPCPDSD

SEQ ID NO: 123 - protein, 126 aa, Artificial Sequence
  G29W/N58D/I67V/L98Q/M99L/Y105L ECD
KAMHVAQPAVVLASSRGIASFVCEYASPWKATEVRVTVLRQADSQVTEVCAATYMMGDELTFLDDSVCTGTSSGNQVNLTIQGLRAMDTGLYICKVEQLYPPPYLLGIGNGTQIYVIDPEPCPDSD

SEQ ID NO: 124 - protein, 126 aa, Artificial Sequence
  I67V/S72G/Q82H/T89A/L98Q/M99L/Y105L ECD
KAMHVAQPAVVLASSRGIASFVCEYASPGKATEVRVTVLRQADSQVTEVCAATYMMGNELTFLDDSVCTGTGSGNQVNLTIHGLRAMDAGLYICKVEQLYPPPYLLGIGNGTQIYVIDPEPCPDSD

SEQ ID NO: 125 - protein, 126 aa, Artificial Sequence
  S72G/R85G/L98Q/M99L/Y105L/L106I ECD
KAMHVAQPAVVLASSRGIASFVCEYASPGKATEVRVTVLRQADSQVTEVCAATYMMGNELTFLDDSICTGTGSGNQVNLTIQGLGAMDTGLYICKVEQLYPPPYLIGIGNGTQIYVIDPEPCPDSD

SEQ ID NO: 126 - protein, 126 aa, Artificial Sequence
  A26T/T47A/M56K/L63P/S72G/Q82R/L98Q/M99L/Y105L ECD
KAMHVAQPAVVLASSRGIASFVCEYTSPGKATEVRVTVLRQADSQVAEVCAATYMKGNELTFPDDSICTGTGSGNQVNLTIRGLRAMDTGLYICKVEQLYPPPYLLGIGNGTQIYVIDPEPCPDSD

SEQ ID NO: 127 - protein, 126 aa, Artificial Sequence
  A26T/M55T/L63P/S72G/L98Q/M99L/Y105L ECD
KAMHVAQPAVVLASSRGIASFVCEYTSPGKATEVRVTVLRQADSQVTEVCAATYTMGNELTFPDDSICTGTGSGNQVNLTIQGLRAMDTGLYICKVEQLYPPPYLLGIGNGTQIYVIDPEPCPDSD

SEQ ID NO: 128 - protein, 126 aa, Artificial Sequence
  L12H/I18V/A42T/M55T/N58D/L98R/Y105L/L106I/P121S ECD
KAMHVAQPAVVHASSRGVASFVCEYASPGKATEVRVTVLRQTDSQVTEVCAATYTMGDELTFLDDSICTGTSSGNQVNLTIQGLRAMDTGLYICKVERMYPPPYLIGIGNGTQIYVIDPESCPDSD

SEQ ID NO: 129 - protein, 126 aa, Artificial Sequence
  I18T/A26T/L63P/S72G/L98Q/Y105L ECD
KAMHVAQPAVVLASSRGTASFVCEYTSPGKATEVRVTVLRQADSQVTEVCAATYMMGNELTFPDDSICTGTGSGNQVNLTIQGLRAMDTGLYICKVEQMYPPPYLLGIGNGTQIYVIDPEPCPDSD

SEQ ID NO: 130 - protein, 126 aa, Artificial Sequence
  L12F/K30R/S72G/Q82R/L98Q/M99L/Y105L ECD
KAMHVAQPAVVFASSRGIASFVCEYASPGRATEVRVTVLRQADSQVTEVCAATYMMGNELTFLDDSICTGTGSGNQVNLTIRGLRAMDTGLYICKVEQLYPPPYLLGIGNGTQIYVIDPEPCPDSD

SEQ ID NO: 131 - protein, 126 aa, Artificial Sequence
  L12P/L63P/S72G/L98Q/M99L/Y105L/L106N/I117L ECD
KAMHVAQPAVVPASSRGIASFVCEYASPGKATEVRVTVLRQADSQVTEVCAATYMMGNELTFPDDSICTGTGSGNQVNLTIQGLRAMDTGLYICKVEQLYPPPYLNGIGNGTQIYVLDPEPCPDSD

SEQ ID NO: 132 - protein, 126 aa, Artificial Sequence
  G29W/M87K/I93V/L98Q/M99L/Y105L ECD
KAMHVAQPAVVLASSRGIASFVCEYASPWKATEVRVTVLRQADSQVTEVCAATYMMGNELTFLDDSICTGTSSGNQVNLTIQGLRAKDTGLYVCKVEQLYPPPYLLGIGNGTQIYVIDPEPCPDSD

SEQ ID NO: 133 - protein, 126 aa, Artificial Sequence
  P28L/E33V/L63P/S72G/L98Q/M99L/Y105L ECD
KAMHVAQPAVVLASSRGIASFVCEYASLGKATVVRVTVLRQADSQVTEVCAATYMMGNELTFPDDSICTGTGSGNQVNLTIQGLRAMDTGLYICKVEQLYPPPYLLGIGNGTQIYVIDPEPCPDSD

SEQ ID NO: 134 - protein, 126 aa, Artificial Sequence
  G29W/T53S/M56K/L63P/Q82H/L98Q/M99I/Y105L ECD
KAMHVAQPAVVLASSRGIASFVCEYASPWKATEVRVTVLRQADSQVTEVCAASYMKGNELTFPDDSICTGTSSGNQVNLTIHGLRAMDTGLYICKVEQIYPPPYLLGIGNGTQIYVIDPEPCPDSD

SEQ ID NO: 135 - protein, 126 aa, Artificial Sequence
  I18F/L63P/L98Q/M99L/Y105L/P121S ECD
KAMHVAQPAVVLASSRGFASFVCEYASPGKATEVRVTVLRQADSQVTEVCAATYMMGNELTFPDDSICTGTSSGNQVNLTIQGLRAMDTGLYICKVEQLYPPPYLLGIGNGTQIYVIDPESCPDSD

SEQ ID NO: 136 - protein, 126 aa, Artificial Sequence
  L63P/L98Q/M99L/Y105L/I108V ECD
KAMHVAQPAVVLASSRGIASFVCEYASPGKATEVRVTVLRQADSQVTEVCAATYMMGNELTFPDDSICTGTSSGNQVNLTIQGLRAMDTGLYICKVEQLYPPPYLLGVGNGTQIYVIDPEPCPDSD

SEQ ID NO: 137 - protein, 126 aa, Artificial Sequence
  A26T/A42V/Q45H/I67N/M87K/E97Q/M99L ECD
KAMHVAQPAVVLASSRGIASFVCEYTSPGKATEVRVTVLRQVDSHVTEVCAATYMMGNELTFLDDSNCTGTSSGNQVNLTIQGLRAKDTGLYICKVQLLYPPPYYLGIGNGTQIYVIDPEPCPDSD

SEQ ID NO: 138 - protein, 126 aa, Artificial Sequence
  M56V/E59G/L63P/S72G/M87K/I93V/L98Q/M99L/Y105L/I117E ECD
KAMHVAQPAVVLASSRGIASFVCEYASPGKATEVRVTVLRQADSQVTEVCAATYMVGNGLTFPDDSICTGTGSGNQVNLTIQGLRAKDTGLYVCKVEQLYPPPYLLGIGNGTQIYVEDPEPCPDSD

SEQ ID NO: 139 - protein, 126 aa, Artificial Sequence
  G29W/M87K/T89S/L98Q/M99L/Y105L/I108V/I117L ECD
KAMHVAQPAVVLASSRGIASFVCEYASPWKATEVRVTVLRQADSQVTEVCAATYMMGNELTFLDDSICTGTSSGNQVNLTIQGLRAKDSGLYICKVEQLYPPPYLLGVGNGTQIYVLDPEPCPDSD

SEQ ID NO: 140 - protein, 126 aa, Artificial Sequence
  L12P/M56V/L63P/V96I/L98Q/M99L/Y105L/Y115H ECD
KAMHVAQPAVVPASSRGIASFVCEYASPGKATEVRVTVLRQADSQVTEVCAATYMVGNELTFPDDSICTGTSSGNQVNLTIQGLRAMDTGLYICKIEQLYPPPYLLGIGNGTQIHVIDPEPCPDSD

SEQ ID NO: 141 - protein, 126 aa, Artificial Sequence
  G29W/T53S/M56K/T61N/L63P/L98Q/Y105L ECD
KAMHVAQPAVVLASSRGIASFVCEYASPWKATEVRVTVLRQADSQVTEVCAASYMKGNELNFPDDSICTGTSSGNQVNLTIQGLRAMDTGLYICKVEQMYPPPYLLGIGNGTQIYVIDPEPCPDSD

SEQ ID NO: 142 - protein, 126 aa, Artificial Sequence
  I18T/A26S/M55T/M56V/L63P/S72G/L98Q/M99L/Y105L/I117K ECD
KAMHVAQPAVVLASSRGTASFVCEYSSPGKATEVRVTVLRQADSQVTEVCAATYTVGNELTFPDDSICTGTGSGNQVNLTIQGLRAMDTGLYICKVEQLYPPPYLLGIGNGTQIYVKDPEPCPDSD

SEQ ID NO: 143 - protein, 126 aa, Artificial Sequence
  I18T/T61R/L63P/S72G/L98Q/M99L/Y105L ECD
KAMHVAQPAVVLASSRGTASFVCEYASPGKATEVRVTVLRQADSQVTEVCAATYMMGNELRFPDDSICTGTGSGNQVNLTIQGLRAMDTGLYICKVEQLYPPPYLLGIGNGTQIYVIDPEPCPDSD

SEQ ID NO: 144 - protein, 126 aa, Artificial Sequence
  L12P/L63P/S72G/L98Q/M99L/Y105L ECD
KAMHVAQPAVVPASSRGIASFVCEYASPGKATEVRVTVLRQADSQVTEVCAATYMMGNELTFPDDSICTGTGSGNQVNLTIQGLRAMDTGLYICKVEQLYPPPYLLGIGNGTQIYVIDPEPCPDSD

SEQ ID NO: 145 - protein, 126 aa, Artificial Sequence
  E33M/L63P/S72G/L98Q/Y105L/I108F ECD
KAMHVAQPAVVLASSRGIASFVCEYASPGKATMVRVTVLRQADSQVTEVCAATYMMGNELTFPDDSICTGTGSGNQVNLTIQGLRAMDTGLYICKVEQMYPPPYLLGFGNGTQIYVIDPEPCPDSD

SEQ ID NO: 146 - protein, 126 aa, Artificial Sequence
  L12P/R16H/A26T/T61S/L63P/M87V/L98Q/M99L/Y105L/L106I/I117L ECD
KAMHVAQPAVVPASSHGIASFVCEYTSPGKATEVRVTVLRQADSQVTEVCAATYMMGNELSFPDDSICTGTSSGNQVNLTIQGLRAVDTGLYICKVEQLYPPPYLIGIGNGTQIYVLDPEPCPDSD

SEQ ID NO: 147 - protein, 126 aa, Artificial Sequence
  G29W/T53S/M56K/N58S/L63P/M87V/L98Q/Y105L/P121S ECD
KAMHVAQPAVVLASSRGIASFVCEYASPWKATEVRVTVLRQADSQVTEVCAASYMKGSELTFPDDSICTGTSSGNQVNLTIQGLRAVDTGLYICKVEQMYPPPYLLGIGNGTQIYVIDPESCPDSD

SEQ ID NO: 148 - protein, 126 aa, Artificial Sequence
  G29W/L63P/S72G/L98Q/Y105L/P121S ECD
KAMHVAQPAVVLASSRGIASFVCEYASPWKATEVRVTVLRQADSQVTEVCAATYMMGNELTFPDDSICTGTGSGNQVNLTIQGLRAMDTGLYICKVEQMYPPPYLLGIGNGTQIYVIDPESCPDSD

SEQ ID NO: 149 - protein, 126 aa, Artificial Sequence
  G29W/T53S/M56K/N58S/L63P/M87V/L98Q/Y105L ECD
KAMHVAQPAVVLASSRGIASFVCEYASPWKATEVRVTVLRQADSQVTEVCAASYMKGSELTFPDDSICTGTSSGNQVNLTIQGLRAVDTGLYICKVEQMYPPPYLLGIGNGTQIYVIDPEPCPDSD

SEQ ID NO: 150 - protein, 126 aa, Artificial Sequence
  G29W/T53S/M56K/N58S/L63P/M87V/L98Q/Y105L/I108V ECD
KAMHVAQPAVVLASSRGIASFVCEYASPWKATEVRVTVLRQADSQVTEVCAASYMKGSELTFPDDSICTGTSSGNQVNLTIQGLRAVDTGLYICKVEQMYPPPYLLGVGNGTQIYVIDPEPCPDSD

SEQ ID NO: 151 - protein, 126 aa, Artificial Sequence
  G29W/T53S/L63P/S72G/L98Q/Y105L ECD
KAMHVAQPAVVLASSRGIASFVCEYASPWKATEVRVTVLRQADSQVTEVCAASYMMGNELTFPDDSICTGTGSGNQVNLTIQGLRAMDTGLYICKVEQMYPPPYLLGIGNGTQIYVIDPEPCPDSD

SEQ ID NO: 152 - protein, 126 aa, Artificial Sequence
  V10A/G29W/T53S/M56K/L63P/L98Q/Y105L/P121S ECD
KAMHVAQPAAVLASSRGIASFVCEYASPWKATEVRVTVLRQADSQVTEVCAASYMKGNELTFPDDSICTGTSSGNQVNLTIQGLRAMDTGLYICKVEQMYPPPYLLGIGNGTQIYVIDPESCPDSD

SEQ ID NO: 153 - protein, 127 aa, artificial sequence
  CTLA-4 ECD
KAMHVAQPAVVLASSRGIASFVCEYASPGKYTEVRVTVLRQADSQVTEVCAATYMMGNELTFLDDSICTGTSSGNQVNLTIQGLRAMDTGLYICKVELMYPPPYYEGIGNGTQIYVIDPEPCPDSDQ

SEQ ID NO: 154 - protein, 126 aa, artificial sequence
  Belatacept ECD with C121C
KAMHVAQPAVVLASSRGIASFVCEYASPGKYTEVRVTVLRQADSQVTEVCAATYMMGNELTFLDDSICTGTSSGNQVNLTIQGLRAMDTGLYICKVELMYPPPYYEGIGNGTQIYVIDPEPCPDSD

SEQ ID NO: 155 - protein, 127 aa, artificial sequence
  CTLA-4 ECD
KAMHVAQPAVVLASSRGIASFVCEYASPGKYTEVRVTVLRQADSQVTEVCAATYMMGNELTFLDDSICTGTSSGNQVNLTIQGLRAMDTGLYICKVELMYPPPYYEGIGNGTQIYVIDPEPSPDSDQ

SEQ ID NO: 156 - protein, 126 aa, Artificial Sequence
  CTLA-4 ECD
KAMHVAQPAVVLASSRGIASFVCEYASPGKYTEVRVTVLRQADSQVTEVCAATYMMGNELTFLDDSICTGTSSGNQVNLTIQGLRAMDTGLYICKVELMYPPPYYEGIGNGTQIYVIDPEPSPDSD

SEQ ID NO: 157 - protein, 126 aa, Artificial sequence
  T89A/L98Q/M99L/Y105L/L106I/Y115N/E120D/C122P/D124P/S125I/D126P ECD
KAMHVAQPAVVLASSRGIASFVCEYASPGKATEVRVTVLRQADSQVTEVCAATYMMGNELTFLDDSICTGTSSGNQVNLTIQGLRAMDAGLYICKVEQLYPPPYLIGIGNGTQINVIDPDPPPPIP

SEQ ID NO: 158 - protein, 126 aa, Artificial sequence
  N58S/L63P/T71A/S72G/L98Q/M99L/Y105L/D124I/S125P/D126T ECD
KAMHVAQPAVVLASSRGIASFVCEYASPGKATEVRVTVLRQADSQVTEVCAATYMMGSELTFPDDSICTGAGSGNQVNLTIQGLRAMDTGLYICKVEQLYPPPYLLGIGNGTQIYVIDPEPCPIPT

SEQ ID NO: 159 - protein, 126 aa, Artificial sequence
  R16G/E33M/N58S/E59G/L63P/L98Q/Y105L/E120D/C122P/D124P/S125I/D126P ECD
KAMHVAQPAVVLASSGGIASFVCEYASPGKATMVRVTVLRQADSQVTEVCAATYMMGSGLTFPDDSICTGTSSGNQVNLTIQGLRAMDTGLYICKVEQMYPPPYLLGIGNGTQIYVIDPDPPPPIP

SEQ ID NO: 160 - protein, 126 aa, Artificial sequence
  G29W/L63P/S72G/L98Q/Y105L/P121S/D126T ECD
KAMHVAQPAVVLASSRGIASFVCEYASPWKATEVRVTVLRQADSQVTEVCAATYMMGNELTFPDDSICTGTGSGNQVNLTIQGLRAMDTGLYICKVEQMYPPPYLLGIGNGTQIYVIDPESCPDST

SEQ ID NO: 161 - protein, 126 aa, Artificial sequence
  L12H/E33M/L98Q/Y105L ECD
KAMHVAQPAVVHASSRGIASFVCEYASPGKATMVRVTVLRQADSQVTEVCAATYMMGNELTFLDDSICTGTSSGNQVNLTIQGLRAMDTGLYICKVEQMYPPPYLLGIGNGTQIYVIDPEPCPDSD

SEQ ID NO: 162 - protein, 126 aa, Artificial sequence
  T53S/M56K/N58S/L63P/M87V/L98Q/Y105L ECD
KAMHVAQPAVVLASSRGIASFVCEYASPGKATEVRVTVLRQADSQVTEVCAASYMKGSELTFPDDSICTGTSSGNQVNLTIQGLRAVDTGLYICKVEQMYPPPYLLGIGNGTQIYVIDPEPCPDSD

SEQ ID NO: 163 - protein, 126 aa, Artificial sequence
  I18T/A26T/M55T/M56K/L63P/L98Q/M99L/Y105L ECD
KAMHVAQPAVVLASSRGTASFVCEYTSPGKATEVRVTVLRQADSQVTEVCAATYTKGNELTFPDDSICTGTSSGNQVNLTIQGLRAMDTGLYICKVEQLYPPPYLLGIGNGTQIYVIDPEPCPDSD

SEQ ID NO: 164 - protein, 126 aa, Artificial sequence
  I18T/A26T/M56K/L63P/L98Q/Y105L ECD
KAMHVAQPAVVLASSRGTASFVCEYTSPGKATEVRVTVLRQADSQVTEVCAATYMKGNELTFPDDSICTGTSSGNQVNLTIQGLRAMDTGLYICKVEQMYPPPYLLGIGNGTQIYVIDPEPCPDSD

SEQ ID NO: 165 - protein, 126 aa, Artificial sequence
  T53S/L63P/L98Q ECD
KAMHVAQPAVVLASSRGIASFVCEYASPGKATEVRVTVLRQADSQVTEVCAASYMMGNELTFPDDSICTGTSSGNQVNLTIQGLRAMDTGLYICKVEQMYPPPYYLGIGNGTQIYVIDPEPCPDSD

SEQ ID NO: 166 - protein, 126 aa, Artificial sequence
  T53S/L63P/Y105L ECD
KAMHVAQPAVVLASSRGIASFVCEYASPGKATEVRVTVLRQADSQVTEVCAASYMMGNELTFPDDSICTGTSSGNQVNLTIQGLRAMDTGLYICKVELMYPPPYLLGIGNGTQIYVIDPEPCPDSD

SEQ ID NO: 167 - protein, 126 aa, Artificial sequence
  T53S/M56K/N58S/L63P/M87V/L98Q ECD
KAMHVAQPAVVLASSRGIASFVCEYASPGKATEVRVTVLRQADSQVTEVCAASYMKGSELTFPDDSICTGTSSGNQVNLTIQGLRAVDTGLYICKVEQMYPPPYYLGIGNGTQIYVIDPEPCPDSD

SEQ ID NO: 168 - protein, 126 aa, Artificial sequence
  T53S/M56K/N58S/L63P/M87V/Y105L ECD
KAMHVAQPAVVLASSRGIASFVCEYASPGKATEVRVTVLRQADSQVTEVCAASYMKGSELTFPDDSICTGTSSGNQVNLTIQGLRAVDTGLYICKVELMYPPPYLLGIGNGTQIYVIDPEPCPDSD

SEQ ID NO: 169 - protein, 126 aa, Artificial sequence
  T53S/M56K/N58S/L63P/L98Q/Y105L ECD
KAMHVAQPAVVLASSRGIASFVCEYASPGKATEVRVTVLRQADSQVTEVCAASYMKGSELTFPDDSICTGTSSGNQVNLTIQGLRAMDTGLYICKVEQMYPPPYLLGIGNGTQIYVIDPEPCPDSD

SEQ ID NO: 170 - protein, 126 aa, Artificial sequence
  T53S/M56K/N58S/M87V/L98Q/Y105L ECD
KAMHVAQPAVVLASSRGIASFVCEYASPGKATEVRVTVLRQADSQVTEVCAASYMKGSELTFLDDSICTGTSSGNQVNLTIQGLRAVDTGLYICKVEQMYPPPYLLGIGNGTQIYVIDPEPCPDSD

SEQ ID NO: 171 - protein, 126 aa, Artificial sequence
  T53S/M56K/L63P/M87V/L98Q/Y105L ECD
KAMHVAQPAVVLASSRGIASFVCEYASPGKATEVRVTVLRQADSQVTEVCAASYMKGNELTFPDDSICTGTSSGNQVNLTIQGLRAVDTGLYICKVEQMYPPPYLLGIGNGTQIYVIDPEPCPDSD

SEQ ID NO: 172 - protein, 126 aa, Artificial sequence
  T53S/N58S/L63P/M87V/L98Q/Y105L ECD
KAMHVAQPAVVLASSRGIASFVCEYASPGKATEVRVTVLRQADSQVTEVCAASYMMGSELTFPDDSICTGTSSGNQVNLTIQGLRAVDTGLYICKVEQMYPPPYLLGIGNGTQIYVIDPEPCPDSD

SEQ ID NO: 173 - protein, 126 aa, Artificial sequence
  M56K/N58S/L63P/M87V/L98Q/Y105L ECD
KAMHVAQPAVVLASSRGIASFVCEYASPGKATEVRVTVLRQADSQVTEVCAATYMKGSELTFPDDSICTGTSSGNQVNLTIQGLRAVDTGLYICKVEQMYPPPYLLGIGNGTQIYVIDPEPCPDSD

SEQ ID NO: 174 - protein, 126 aa, Artificial sequence
  E33V/L98Q/Y105L ECD
KAMHVAQPAVVLASSRGIASFVCEYASPGKATVVRVTVLRQADSQVTEVCAATYMMGNELTFLDDSICTGTSSGNQVNLTIQGLRAMDTGLYICKVEQMYPPPYLLGIGNGTQIYVIDPEPCPDSD

SEQ ID NO: 175 - protein, 126 aa, Artificial sequence
  E33V/M99L/Y105L ECD
KAMHVAQPAVVLASSRGIASFVCEYASPGKATVVRVTVLRQADSQVTEVCAATYMMGNELTFLDDSICTGTSSGNQVNLTIQGLRAMDTGLYICKVELLYPPPYLLGIGNGTQIYVIDPEPCPDSD

SEQ ID NO: 176 - protein, 126 aa, Artificial sequence
  E33V/L98Q/M99L  ECD
KAMHVAQPAVVLASSRGIASFVCEYASPGKATVVRVTVLRQADSQVTEVCAATYMMGNELTFLDDSICTGTSSGNQVNLTIQGLRAMDTGLYICKVEQLYPPPYYLGIGNGTQIYVIDPEPCPDSD

SEQ ID NO: 177 - protein, 126 aa, Artificial sequence
  E33V/M99L ECD
KAMHVAQPAVVLASSRGIASFVCEYASPGKATVVRVTVLRQADSQVTEVCAATYMMGNELTFLDDSICTGTSSGNQVNLTIQGLRAMDTGLYICKVELLYPPPYYLGIGNGTQIYVIDPEPCPDSD

SEQ ID NO: 178 - protein, 126 aa, Artificial sequence
  L12F/R16H/G29W/M56T/L98Q ECD
KAMHVAQPAVVFASSHGIASFVCEYASPWKATEVRVTVLRQADSQVTEVCAATYMTGNELTFLDDSICTGTSSGNQVNLTIQGLRAMDTGLYICKVEQMYPPPYYLGIGNGTQIYVIDPEPCPDSD

SEQ ID NO: 179 - protein, 126 aa, Artificial sequence
  L12F/R16H/G29W/M56T/Y105L ECD
KAMHVAQPAVVFASSHGIASFVCEYASPWKATEVRVTVLRQADSQVTEVCAATYMTGNELTFLDDSICTGTSSGNQVNLTIQGLRAMDTGLYICKVELMYPPPYLLGIGNGTQIYVIDPEPCPDSD

SEQ ID NO: 180 - protein, 126 aa, Artificial sequence
  L12F/R16H/G29W/L98Q/Y105L ECD
KAMHVAQPAVVFASSHGIASFVCEYASPWKATEVRVTVLRQADSQVTEVCAATYMMGNELTFLDDSICTGTSSGNQVNLTIQGLRAMDTGLYICKVEQMYPPPYLLGIGNGTQIYVIDPEPCPDSD

SEQ ID NO: 181 - protein, 126 aa, Artificial sequence
  L12F/R16H/M56T/L98Q/Y105L ECD
KAMHVAQPAVVFASSHGIASFVCEYASPGKATEVRVTVLRQADSQVTEVCAATYMTGNELTFLDDSICTGTSSGNQVNLTIQGLRAMDTGLYICKVEQMYPPPYLLGIGNGTQIYVIDPEPCPDSD

SEQ ID NO: 182 - protein, 126 aa, Artificial sequence
  G29W/M56T/L98Q/Y105L ECD
KAMHVAQPAVVLASSRGIASFVCEYASPWKATEVRVTVLRQADSQVTEVCAATYMTGNELTFLDDSICTGTSSGNQVNLTIQGLRAMDTGLYICKVEQMYPPPYLLGIGNGTQIYVIDPEPCPDSD

SEQ ID NO: 183 - protein, 126 aa, Artificial sequence
  L12F/G29W/L98Q/Y105L ECD
KAMHVAQPAVVFASSRGIASFVCEYASPWKATEVRVTVLRQADSQVTEVCAATYMMGNELTFLDDSICTGTSSGNQVNLTIQGLRAMDTGLYICKVEQMYPPPYLLGIGNGTQIYVIDPEPCPDSD

SEQ ID NO: 184 - protein, 126 aa, Artificial sequence
  L12F/L98Q/Y105L ECD
KAMHVAQPAVVFASSRGIASFVCEYASPGKATEVRVTVLRQADSQVTEVCAATYMMGNELTFLDDSICTGTSSGNQVNLTIQGLRAMDTGLYICKVEQMYPPPYLLGIGNGTQIYVIDPEPCPDSD

SEQ ID NO: 185 - protein, 126 aa, Artificial sequence
  R16H/L98Q/Y105L ECD
KAMHVAQPAVVLASSHGIASFVCEYASPGKATEVRVTVLRQADSQVTEVCAATYMMGNELTFLDDSICTGTSSGNQVNLTIQGLRAMDTGLYICKVEQMYPPPYLLGIGNGTQIYVIDPEPCPDSD

SEQ ID NO: 186 - protein, 126 aa, Artificial sequence
  G29W/L98Q/Y105L ECD
KAMHVAQPAVVLASSRGIASFVCEYASPWKATEVRVTVLRQADSQVTEVCAATYMMGNELTFLDDSICTGTSSGNQVNLTIQGLRAMDTGLYICKVEQMYPPPYLLGIGNGTQIYVIDPEPCPDSD

SEQ ID NO: 187 - protein, 126 aa, Artificial sequence
  M56T/L98Q/Y105L ECD
KAMHVAQPAVVLASSRGIASFVCEYASPGKATEVRVTVLRQADSQVTEVCAATYMTGNELTFLDDSICTGTSSGNQVNLTIQGLRAMDTGLYICKVEQMYPPPYLLGIGNGTQIYVIDPEPCPDSD

SEQ ID NO: 188 - protein, 126 aa, Artificial sequence
  L12F/R16H/G29W/M56T/S72G/L98Q/Y105L ECD
KAMHVAQPAVVFASSHGIASFVCEYASPWKATEVRVTVLRQADSQVTEVCAATYMTGNELTFLDDSICTGTGSGNQVNLTIQGLRAMDTGLYICKVEQMYPPPYLLGIGNGTQIYVIDPEPCPDSD

SEQ ID NO: 189 - protein, 126 aa, Artificial sequence
  G29W/M56T/S72G/L98Q/Y105L ECD
KAMHVAQPAVVLASSRGIASFVCEYASPWKATEVRVTVLRQADSQVTEVCAATYMTGNELTFLDDSICTGTGSGNQVNLTIQGLRAMDTGLYICKVEQMYPPPYLLGIGNGTQIYVIDPEPCPDSD

SEQ ID NO: 190 - protein, 126 aa, Artificial sequence
  I18T, T61R, L63P, S72G, L98Q, M99L, P102L, Y105L ECD
KAMHVAQPAVVLASSRGTASFVCEYASPGKATEVRVTVLRQADSQVTEVCAATYMMGNELRFPDDSICTGTGSGNQVNLTIQGLRAMDTGLYICKVEQLYPLPYLLGIGNGTQIYVIDPEPCPDSD

SEQ ID NO: 191 - protein, 102 aa, artificial sequence
  unmodified CTLA-4 IgV (39-140 of P16410.3)
HVAQPAVVLASSRGIASFVCEYASPGKATEVRVTVLRQADSQVTEVCAATYMMGNELTFLDDSICTGTSSGNQVNLTIQGLRAMDTGLYICKVELMYPPPYY

SEQ ID NO: 192 - protein, 102 aa, Artificial Sequence
  L12P/A26T/L63P/L98Q/Y105L IgV
HVAQPAVVPASSRGIASFVCEYTSPGKATEVRVTVLRQADSQVTEVCAATYMMGNELTFPDDSICTGTSSGNQVNLTIQGLRAMDTGLYICKVEQMYPPPYL

SEQ ID NO: 193 - protein, 102 aa, Artificial Sequence
  L63P/L98R IgV domain (of L63P/L98R/N110K - IgV doesn't contain N110 residue)
HVAQPAVVLASSRGIASFVCEYASPGKATEVRVTVLRQADSQVTEVCAATYMMGNELTFPDDSICTGTSSGNQVNLTIQGLRAMDTGLYICKVERMYPPPYY

SEQ ID NO: 194 - protein, 102 aa, Artificial Sequence
  L12P/A26T IgV domain
HVAQPAVVPASSRGIASFVCEYTSPGKATEVRVTVLRQADSQVTEVCAATYMMGNELTFLDDSICTGTSSGNQVNLTIQGLRAMDTGLYICKVELMYPPPYY

SEQ ID NO: 195 - protein, 102 aa, Artificial Sequence
  L12P/A26T/L63P IgV domain
HVAQPAVVPASSRGIASFVCEYTSPGKATEVRVTVLRQADSQVTEVCAATYMMGNELTFPDDSICTGTSSGNQVNLTIQGLRAMDTGLYICKVELMYPPPYY

SEQ ID NO: 196 - protein, 102 aa, Artificial Sequence
  L63P/L98Q/Y105L IgV domain
HVAQPAVVLASSRGIASFVCEYASPGKATEVRVTVLRQADSQVTEVCAATYMMGNELTFPDDSICTGTSSGNQVNLTIQGLRAMDTGLYICKVEQMYPPPYL

SEQ ID NO: 197 - protein, 102 aa, Artificial Sequence
  L98Q/Y105L IgV domain
HVAQPAVVLASSRGIASFVCEYASPGKATEVRVTVLRQADSQVTEVCAATYMMGNELTFLDDSICTGTSSGNQVNLTIQGLRAMDTGLYICKVEQMYPPPYL

SEQ ID NO: 198 - protein, 102 aa, Artificial Sequence
  L63P IgV domain
HVAQPAVVLASSRGIASFVCEYASPGKATEVRVTVLRQADSQVTEVCAATYMMGNELTFPDDSICTGTSSGNQVNLTIQGLRAMDTGLYICKVELMYPPPYY

SEQ ID NO: 199 - protein, 102 aa, Artificial Sequence
  L98R IgV domain (of L98R/N110K - IgV doesn't contain N110 residue)
HVAQPAVVLASSRGIASFVCEYASPGKATEVRVTVLRQADSQVTEVCAATYMMGNELTFLDDSICTGTSSGNQVNLTIQGLRAMDTGLYICKVERMYPPPYY

SEQ ID NO: 200 - protein, 102 aa, Artificial Sequence
  L12P/A26T/L63P/L98Q/M99L/Y105L IgV domain
HVAQPAVVPASSRGIASFVCEYTSPGKATEVRVTVLRQADSQVTEVCAATYMMGNELTFPDDSICTGTSSGNQVNLTIQGLRAMDTGLYICKVEQLYPPPYL

SEQ ID NO: 201 - protein, 102 aa, Artificial Sequence
  E33M/Q82H/L98Q/M99L/Y105L IgV domain
HVAQPAVVLASSRGIASFVCEYASPGKATMVRVTVLRQADSQVTEVCAATYMMGNELTFLDDSICTGTSSGNQVNLTIHGLRAMDTGLYICKVEQLYPPPYL

SEQ ID NO: 202 - protein, 102 aa, Artificial Sequence
  L63P/S72G/L98Q/M99L/Y105L IgV domain
HVAQPAVVLASSRGIASFVCEYASPGKATEVRVTVLRQADSQVTEVCAATYMMGNELTFPDDSICTGTGSGNQVNLTIQGLRAMDTGLYICKVEQLYPPPYL

SEQ ID NO: 203 - protein, 102 aa, Artificial Sequence
  S14N/R16C/I18T/M56K/T61A/L63P/A86T/M99L IgV domain
HVAQPAVVLANSCGTASFVCEYASPGKATEVRVTVLRQADSQVTEVCAATYMKGNELAFPDDSICTGTSSGNQVNLTIQGLRTMDTGLYICKVELLYPPPYY

SEQ ID NO: 204 - protein, 102 aa, Artificial Sequence
  S27P/M56K/L63P/S72G/S73R/T89A/M99L/Y105L IgV domain
HVAQPAVVLASSRGIASFVCEYAPPGKATEVRVTVLRQADSQVTEVCAATYMKGNELTFPDDSICTGTGRGNQVNLTIQGLRAMDAGLYICKVELLYPPPYL

SEQ ID NO: 205 - protein, 102 aa, Artificial Sequence
  M56K/L63P/N75D/V96I/M99L/Y105L IgV domain
HVAQPAVVLASSRGIASFVCEYASPGKATEVRVTVLRQADSQVTEVCAATYMKGNELTFPDDSICTGTSSGDQVNLTIQGLRAMDTGLYICKIELLYPPPYL

SEQ ID NO: 206 - protein, 102 aa, Artificial Sequence
  L63P/S72G/Y105L IgV domain
HVAQPAVVLASSRGIASFVCEYASPGKATEVRVTVLRQADSQVTEVCAATYMMGNELTFPDDSICTGTGSGNQVNLTIQGLRAMDTGLYICKVELMYPPPYL

SEQ ID NO: 207 - protein, 102 aa, Artificial Sequence
  L63P/L98Q/M99L/Y105L IgV domain
HVAQPAVVLASSRGIASFVCEYASPGKATEVRVTVLRQADSQVTEVCAATYMMGNELTFPDDSICTGTSSGNQVNLTIQGLRAMDTGLYICKVEQLYPPPYL

SEQ ID NO: 208 - protein, 102 aa, Artificial Sequence
  A26T/L63P/S72G/L98Q/Y105L IgV domain
HVAQPAVVLASSRGIASFVCEYTSPGKATEVRVTVLRQADSQVTEVCAATYMMGNELTFPDDSICTGTGSGNQVNLTIQGLRAMDTGLYICKVEQMYPPPYL

SEQ ID NO: 209 - protein, 102 aa, Artificial Sequence
  L63P/L98Q IgV domain
HVAQPAVVLASSRGIASFVCEYASPGKATEVRVTVLRQADSQVTEVCAATYMMGNELTFPDDSICTGTSSGNQVNLTIQGLRAMDTGLYICKVEQMYPPPYY

SEQ ID NO: 210 - protein, 102 aa, Artificial Sequence
  G29W/L98Q/M99L/Y105L IgV domain
HVAQPAVVLASSRGIASFVCEYASPWKATEVRVTVLRQADSQVTEVCAATYMMGNELTFLDDSICTGTSSGNQVNLTIQGLRAMDTGLYICKVEQLYPPPYL

SEQ ID NO: 211 - protein, 102 aa, Artificial Sequence
  T37S/M56V/L98Q/Y105L IgV domain
HVAQPAVVLASSRGIASFVCEYASPGKATEVRVSVLRQADSQVTEVCAATYMVGNELTFLDDSICTGTSSGNQVNLTIQGLRAMDTGLYICKVEQMYPPPYL

SEQ ID NO: 212 - protein, 102 aa, Artificial Sequence
  A26T/Y54F/M56K/M99L/Y105L IgV domain
HVAQPAVVLASSRGIASFVCEYTSPGKATEVRVTVLRQADSQVTEVCAATFMKGNELTFLDDSICTGTSSGNQVNLTIQGLRAMDTGLYICKVELLYPPPYL

SEQ ID NO: 213 - protein, 102 aa, Artificial Sequence
  L12P/I18T/A26T/M55T/T69S/S72G/M99L/Y105L IgV domain
HVAQPAVVPASSRGTASFVCEYTSPGKATEVRVTVLRQADSQVTEVCAATYTMGNELTFLDDSICSGTGSGNQVNLTIQGLRAMDTGLYICKVELLYPPPYL

SEQ ID NO: 214 - protein, 102 aa, Artificial Sequence
  V22I/L63P/L98Q/Y105L IgV domain
HVAQPAVVLASSRGIASFICEYASPGKATEVRVTVLRQADSQVTEVCAATYMMGNELTFPDDSICTGTSSGNQVNLTIQGLRAMDTGLYICKVEQMYPPPYL

SEQ ID NO: 215 - protein, 102 aa, Artificial Sequence
  A26T/L63P/S72G/L98Q/M99L/Y105L IgV domain
HVAQPAVVLASSRGIASFVCEYTSPGKATEVRVTVLRQADSQVTEVCAATYMMGNELTFPDDSICTGTGSGNQVNLTIQGLRAMDTGLYICKVEQLYPPPYL

SEQ ID NO: 216 - protein, 102 aa, Artificial Sequence
  E33M/A42T/L98Q/Y105L IgV domain
HVAQPAVVLASSRGIASFVCEYASPGKATMVRVTVLRQTDSQVTEVCAATYMMGNELTFLDDSICTGTSSGNQVNLTIQGLRAMDTGLYICKVEQMYPPPYL

SEQ ID NO: 217 - protein, 102 aa, Artificial Sequence
  M55T/E97Q/M99L/Y105F IgV domain
HVAQPAVVLASSRGIASFVCEYASPGKATEVRVTVLRQADSQVTEVCAATYTMGNELTFLDDSICTGTSSGNQVNLTIQGLRAMDTGLYICKVQLLYPPPYF

SEQ ID NO: 218 - protein, 102 aa, Artificial Sequence
  M55T/S72G/L98Q/M99L/Y105L IgV domain
HVAQPAVVLASSRGIASFVCEYASPGKATEVRVTVLRQADSQVTEVCAATYTMGNELTFLDDSICTGTGSGNQVNLTIQGLRAMDTGLYICKVEQLYPPPYL

SEQ ID NO: 219 - protein, 102 aa, Artificial Sequence
  R16C/G29W/E33V/M55T/L63P/L98Q/Y105L IgV domain
HVAQPAVVLASSCGIASFVCEYASPWKATVVRVTVLRQADSQVTEVCAATYTMGNELTFPDDSICTGTSSGNQVNLTIQGLRAMDTGLYICKVEQMYPPPYL

SEQ ID NO: 220 - protein, 102 aa, Artificial Sequence
  M56L/L63P/L98Q/Y105L IgV domain
HVAQPAVVLASSRGIASFVCEYASPGKATEVRVTVLRQADSQVTEVCAATYMLGNELTFPDDSICTGTSSGNQVNLTIQGLRAMDTGLYICKVEQMYPPPYL

SEQ ID NO: 221 - protein, 102 aa, Artificial Sequence
  S15P/I18V/M56T/L98Q/M99L/Y105L IgV domain
HVAQPAVVLASPRGVASFVCEYASPGKATEVRVTVLRQADSQVTEVCAATYMTGNELTFLDDSICTGTSSGNQVNLTIQGLRAMDTGLYICKVEQLYPPPYL

SEQ ID NO: 222 - protein, 102 aa, Artificial Sequence
  I18T/G29W/L63P/L98Q/Y105L IgV domain
HVAQPAVVLASSRGTASFVCEYASPWKATEVRVTVLRQADSQVTEVCAATYMMGNELTFPDDSICTGTSSGNQVNLTIQGLRAMDTGLYICKVEQMYPPPYL

SEQ ID NO: 223 - protein, 102 aa, Artificial Sequence
  L63P/Q82H/L98Q/M99L/Y105L IgV domain
HVAQPAVVLASSRGIASFVCEYASPGKATEVRVTVLRQADSQVTEVCAATYMMGNELTFPDDSICTGTSSGNQVNLTIHGLRAMDTGLYICKVEQLYPPPYL

SEQ ID NO: 224 - protein, 102 aa, Artificial Sequence
  L98Q/M99L/Y105L IgV domain
HVAQPAVVLASSRGIASFVCEYASPGKATEVRVTVLRQADSQVTEVCAATYMMGNELTFLDDSICTGTSSGNQVNLTIQGLRAMDTGLYICKVEQLYPPPYL

SEQ ID NO: 225 - protein, 102 aa, Artificial Sequence
  M55T/L63P/T71I/M99L/Y105L IgV domain
HVAQPAVVLASSRGIASFVCEYASPGKATEVRVTVLRQADSQVTEVCAATYTMGNELTFPDDSICTGISSGNQVNLTIQGLRAMDTGLYICKVELLYPPPYL

SEQ ID NO: 226 - protein, 102 aa, Artificial Sequence
  A26T/T53S/M56K/L63P/L98Q/Y105L IgV domain
HVAQPAVVLASSRGIASFVCEYTSPGKATEVRVTVLRQADSQVTEVCAASYMKGNELTFPDDSICTGTSSGNQVNLTIQGLRAMDTGLYICKVEQMYPPPYL

SEQ ID NO: 227 - protein, 102 aa, Artificial Sequence
  I18T/A26T/L63P/Q82R/L98Q/Y105L IgV domain
HVAQPAVVLASSRGTASFVCEYTSPGKATEVRVTVLRQADSQVTEVCAATYMMGNELTFPDDSICTGTSSGNQVNLTIRGLRAMDTGLYICKVEQMYPPPYL

SEQ ID NO: 228 - protein, 102 aa, Artificial Sequence
  L12H/M55T/E59D/L63P/M99L IgV domain
HVAQPAVVHASSRGIASFVCEYASPGKATEVRVTVLRQADSQVTEVCAATYTMGNDLTFPDDSICTGTSSGNQVNLTIQGLRAMDTGLYICKVELLYPPPYY

SEQ ID NO: 229 - protein, 102 aa, Artificial Sequence
  I18T/L63P/S72G/L98Q/Y105L IgV domain
HVAQPAVVLASSRGTASFVCEYASPGKATEVRVTVLRQADSQVTEVCAATYMMGNELTFPDDSICTGTGSGNQVNLTIQGLRAMDTGLYICKVEQMYPPPYL

SEQ ID NO: 230 - protein, 102 aa, Artificial Sequence
  I18T/L63P/S72G/L98Q/M99L/Y105L IgV domain
HVAQPAVVLASSRGTASFVCEYASPGKATEVRVTVLRQADSQVTEVCAATYMMGNELTFPDDSICTGTGSGNQVNLTIQGLRAMDTGLYICKVEQLYPPPYL

SEQ ID NO: 231 - protein, 102 aa, Artificial Sequence
  T61A/L63P/S72G/L98Q/M99L/Y105L IgV domain
HVAQPAVVLASSRGIASFVCEYASPGKATEVRVTVLRQADSQVTEVCAATYMMGNELAFPDDSICTGTGSGNQVNLTIQGLRAMDTGLYICKVEQLYPPPYL

SEQ ID NO: 232 - protein, 102 aa, Artificial Sequence
  V38I/L63P/S72G/L98Q/M99L/Y105L IgV domain
HVAQPAVVLASSRGIASFVCEYASPGKATEVRVTILRQADSQVTEVCAATYMMGNELTFPDDSICTGTGSGNQVNLTIQGLRAMDTGLYICKVEQLYPPPYL

SEQ ID NO: 233 - protein, 102 aa, Artificial Sequence
  L63P/S72G/I93L/L98Q/M99L/Y105L IgV domain
HVAQPAVVLASSRGIASFVCEYASPGKATEVRVTVLRQADSQVTEVCAATYMMGNELTFPDDSICTGTGSGNQVNLTIQGLRAMDTGLYLCKVEQLYPPPYL

SEQ ID NO: 234 - protein, 102 aa, Artificial Sequence
  L12I/M55T/M56V/I67T/M99L IgV domain
HVAQPAVVIASSRGIASFVCEYASPGKATEVRVTVLRQADSQVTEVCAATYTVGNELTFLDDSTCTGTSSGNQVNLTIQGLRAMDTGLYICKVELLYPPPYY

SEQ ID NO: 235 - protein, 102 aa, Artificial Sequence
  I18N/A26T/L63H/T89A/L98Q/M99L/Y105L IgV domain
HVAQPAVVLASSRGNASFVCEYTSPGKATEVRVTVLRQADSQVTEVCAATYMMGNELTFHDDSICTGTSSGNQVNLTIQGLRAMDAGLYICKVEQLYPPPYL

SEQ ID NO: 236 - protein, 102 aa, Artificial Sequence
  I18T/E48R/L63P/T69S/L98Q/Y105L IgV domain
HVAQPAVVLASSRGTASFVCEYASPGKATEVRVTVLRQADSQVTRVCAATYMMGNELTFPDDSICSGTSSGNQVNLTIQGLRAMDTGLYICKVEQMYPPPYL

SEQ ID NO: 237 - protein, 102 aa, Artificial Sequence
  I18N/L63P/S72T/M87T/L98Q/Y105L IgV domain
HVAQPAVVLASSRGNASFVCEYASPGKATEVRVTVLRQADSQVTEVCAATYMMGNELTFPDDSICTGTTSGNQVNLTIQGLRATDTGLYICKVEQMYPPPYL

SEQ ID NO: 238 - protein, 102 aa, Artificial Sequence
  G29W/M56T/L63P/L98Q/Y105L IgV domain
HVAQPAVVLASSRGIASFVCEYASPWKATEVRVTVLRQADSQVTEVCAATYMTGNELTFPDDSICTGTSSGNQVNLTIQGLRAMDTGLYICKVEQMYPPPYL

SEQ ID NO: 239 - protein, 102 aa, Artificial Sequence
  G29W/N58S/L63P/M87T/L98Q/M99L/Y105L IgV domain
HVAQPAVVLASSRGIASFVCEYASPWKATEVRVTVLRQADSQVTEVCAATYMMGSELTFPDDSICTGTSSGNQVNLTIQGLRATDTGLYICKVEQLYPPPYL

SEQ ID NO: 240 - protein, 102 aa, Artificial Sequence
  G29W/N58S/L63P/D64N/L98Q/M99L/Y105L IgV domain
HVAQPAVVLASSRGIASFVCEYASPWKATEVRVTVLRQADSQVTEVCAATYMMGSELTFPNDSICTGTSSGNQVNLTIQGLRAMDTGLYICKVEQLYPPPYL

SEQ ID NO: 241 - protein, 102 aa, Artificial Sequence
  I18T/L63P/S72G/M87K/L98Q/M99L/Y105L IgV domain
HVAQPAVVLASSRGTASFVCEYASPGKATEVRVTVLRQADSQVTEVCAATYMMGNELTFPDDSICTGTGSGNQVNLTIQGLRAKDTGLYICKVEQLYPPPYL

SEQ ID NO: 242 - protein, 102 aa, Artificial Sequence
  M56V IgV domain
HVAQPAVVLASSRGIASFVCEYASPGKATEVRVTVLRQADSQVTEVCAATYMVGNELTFLDDSICTGTSSGNQVNLTIQGLRAMDTGLYICKVELMYPPPYY

SEQ ID NO: 243 - protein, 102 aa, Artificial Sequence
  L63P/K95R IgV domain
HVAQPAVVLASSRGIASFVCEYASPGKATEVRVTVLRQADSQVTEVCAATYMMGNELTFPDDSICTGTSSGNQVNLTIQGLRAMDTGLYICRVELMYPPPYY

SEQ ID NO: 244 - protein, 102 aa, Artificial Sequence
  L63P/M87K/M99L IgV domain
HVAQPAVVLASSRGIASFVCEYASPGKATEVRVTVLRQADSQVTEVCAATYMMGNELTFPDDSICTGTSSGNQVNLTIQGLRAKDTGLYICKVELLYPPPYY

SEQ ID NO: 245 - protein, 102 aa, Artificial Sequence
  L63P/M99L/Y105L IgV domain
HVAQPAVVLASSRGIASFVCEYASPGKATEVRVTVLRQADSQVTEVCAATYMMGNELTFPDDSICTGTSSGNQVNLTIQGLRAMDTGLYICKVELLYPPPYL

SEQ ID NO: 246 - protein, 102 aa, Artificial Sequence
  V10A/L63P/L98Q/Y105L IgV domain
HVAQPAAVLASSRGIASFVCEYASPGKATEVRVTVLRQADSQVTEVCAATYMMGNELTFPDDSICTGTSSGNQVNLTIQGLRAMDTGLYICKVEQMYPPPYL

SEQ ID NO: 247 - protein, 102 aa, Artificial Sequence
  M56T/L91R/L98Q/Y105L IgV domain
HVAQPAVVLASSRGIASFVCEYASPGKATEVRVTVLRQADSQVTEVCAATYMTGNELTFLDDSICTGTSSGNQVNLTIQGLRAMDTGRYICKVEQMYPPPYL

SEQ ID NO: 248 - protein, 102 aa, Artificial Sequence
  A26T/L63P/M87V IgV domain
HVAQPAVVLASSRGIASFVCEYTSPGKATEVRVTVLRQADSQVTEVCAATYMMGNELTFPDDSICTGTSSGNQVNLTIQGLRAVDTGLYICKVELMYPPPYY

SEQ ID NO: 249 - protein, 102 aa, Artificial Sequence
  G29W/L63P/L98Q/M99L/Y105L IgV domain
HVAQPAVVLASSRGIASFVCEYASPWKATEVRVTVLRQADSQVTEVCAATYMMGNELTFPDDSICTGTSSGNQVNLTIQGLRAMDTGLYICKVEQLYPPPYL

SEQ ID NO: 250 - protein, 102 aa, Artificial Sequence
  A26T/V46E/L63P/D65G/L98Q IgV domain
HVAQPAVVLASSRGIASFVCEYTSPGKATEVRVTVLRQADSQETEVCAATYMMGNELTFPDGSICTGTSSGNQVNLTIQGLRAMDTGLYICKVEQMYPPPYY

SEQ ID NO: 251 - protein, 102 aa, Artificial Sequence
  G29W/N58S/L63P/L98Q/Y105L IgV domain
HVAQPAVVLASSRGIASFVCEYASPWKATEVRVTVLRQADSQVTEVCAATYMMGSELTFPDDSICTGTSSGNQVNLTIQGLRAMDTGLYICKVEQMYPPPYL

SEQ ID NO: 252 - protein, 102 aa, Artificial Sequence
  G29W/E59G/L63P/L98Q/Y105L IgV domain
HVAQPAVVLASSRGIASFVCEYASPWKATEVRVTVLRQADSQVTEVCAATYMMGNGLTFPDDSICTGTSSGNQVNLTIQGLRAMDTGLYICKVEQMYPPPYL

SEQ ID NO: 253 - protein, 102 aa, Artificial Sequence
  L12H/L63P/S72G/L98Q/Y105L IgV domain
HVAQPAVVHASSRGIASFVCEYASPGKATEVRVTVLRQADSQVTEVCAATYMMGNELTFPDDSICTGTGSGNQVNLTIQGLRAMDTGLYICKVEQMYPPPYL

SEQ ID NO: 254 - protein, 102 aa, Artificial Sequence
  A6T/A26T/M55T/M99L/Y105L IgV domain
HVTQPAVVLASSRGIASFVCEYTSPGKATEVRVTVLRQADSQVTEVCAATYTMGNELTFLDDSICTGTSSGNQVNLTIQGLRAMDTGLYICKVELLYPPPYL

SEQ ID NO: 255 - protein, 102 aa, Artificial Sequence
  A26T/L63P/D65G/L98Q/M99L/Y105L IgV domain
HVAQPAVVLASSRGIASFVCEYTSPGKATEVRVTVLRQADSQVTEVCAATYMMGNELTFPDGSICTGTSSGNQVNLTIQGLRAMDTGLYICKVEQLYPPPYL

SEQ ID NO: 256 - protein, 102 aa, Artificial Sequence
  V10A/L63P/D64V/S72G/L98Q/M99L/Y105L IgV domain
HVAQPAAVLASSRGIASFVCEYASPGKATEVRVTVLRQADSQVTEVCAATYMMGNELTFPVDSICTGTGSGNQVNLTIQGLRAMDTGLYICKVEQLYPPPYL

SEQ ID NO: 257 - protein, 102 aa, Artificial Sequence
  L12P/G29W/D43N/N58S/L63P/L98Q/M99L/Y105L IgV domain
HVAQPAVVPASSRGIASFVCEYASPWKATEVRVTVLRQANSQVTEVCAATYMMGSELTFPDDSICTGTSSGNQVNLTIQGLRAMDTGLYICKVEQLYPPPYL

SEQ ID NO: 258 - protein, 102 aa, Artificial Sequence
  I18V/A26T/L63P/D64E/L98Q/Y105L IgV domain
HVAQPAVVLASSRGVASFVCEYTSPGKATEVRVTVLRQADSQVTEVCAATYMMGNELTFPEDSICTGTSSGNQVNLTIQGLRAMDTGLYICKVEQMYPPPYL

SEQ ID NO: 259 - protein, 102 aa, Artificial Sequence
  A19V/G29W/R35K/L63P/L98Q/M99L/Y105L IgV domain
HVAQPAVVLASSRGIVSFVCEYASPWKATEVKVTVLRQADSQVTEVCAATYMMGNELTFPDDSICTGTSSGNQVNLTIQGLRAMDTGLYICKVEQLYPPPYL

SEQ ID NO: 260 - protein, 102 aa, Artificial Sequence
  L12P/A26T/L63P/S72G/T89M/L98Q/M99L/Y105L IgV domain
HVAQPAVVPASSRGIASFVCEYTSPGKATEVRVTVLRQADSQVTEVCAATYMMGNELTFPDDSICTGTGSGNQVNLTIQGLRAMDMGLYICKVEQLYPPPYL

SEQ ID NO: 261 - protein, 102 aa, Artificial Sequence
  P28L/E33V/L63P/S72G/L98R/M99L/Y105L IgV domain
HVAQPAVVLASSRGIASFVCEYASLGKATVVRVTVLRQADSQVTEVCAATYMMGNELTFPDDSICTGTGSGNQVNLTIQGLRAMDTGLYICKVERLYPPPYL

SEQ ID NO: 262 - protein, 102 aa, Artificial Sequence
  E24Q/L63P/S72G/L98Q/M99L/Y105L IgV domain
HVAQPAVVLASSRGIASFVCQYASPGKATEVRVTVLRQADSQVTEVCAATYMMGNELTFPDDSICTGTGSGNQVNLTIQGLRAMDTGLYICKVEQLYPPPYL

SEQ ID NO: 263 - protein, 102 aa, Artificial Sequence
  I18T/G29R/L63P/S72G/L98Q/M99L/Y105L IgV domain
HVAQPAVVLASSRGTASFVCEYASPRKATEVRVTVLRQADSQVTEVCAATYMMGNELTFPDDSICTGTGSGNQVNLTIQGLRAMDTGLYICKVEQLYPPPYL

SEQ ID NO: 264 - protein, 102 aa, Artificial Sequence
  Q41L/Y54F/M56K/M99L IgV domain
HVAQPAVVLASSRGIASFVCEYASPGKATEVRVTVLRLADSQVTEVCAATFMKGNELTFLDDSICTGTSSGNQVNLTIQGLRAMDTGLYICKVELLYPPPYY

SEQ ID NO: 265 - protein, 102 aa, Artificial Sequence
  S72G/L98Q/M99L/Y105L IgV domain
HVAQPAVVLASSRGIASFVCEYASPGKATEVRVTVLRQADSQVTEVCAATYMMGNELTFLDDSICTGTGSGNQVNLTIQGLRAMDTGLYICKVEQLYPPPYL

SEQ ID NO: 266 - protein, 102 aa, Artificial Sequence
  M56R/L63P/L98Q/M99L/Y105L IgV domain
HVAQPAVVLASSRGIASFVCEYASPGKATEVRVTVLRQADSQVTEVCAATYMRGNELTFPDDSICTGTSSGNQVNLTIQGLRAMDTGLYICKVEQLYPPPYL

SEQ ID NO: 267 - protein, 102 aa, Artificial Sequence
  E33M/L63P/S72G/L98Q/Y105L IgV domain
HVAQPAVVLASSRGIASFVCEYASPGKATMVRVTVLRQADSQVTEVCAATYMMGNELTFPDDSICTGTGSGNQVNLTIQGLRAMDTGLYICKVEQMYPPPYL

SEQ ID NO: 268 - protein, 102 aa, Artificial Sequence
  A26T/M55R/L98Q/M99L/Y105L IgV domain
HVAQPAVVLASSRGIASFVCEYTSPGKATEVRVTVLRQADSQVTEVCAATYRMGNELTFLDDSICTGTSSGNQVNLTIQGLRAMDTGLYICKVEQLYPPPYL

SEQ ID NO: 269 - protein, 102 aa, Artificial Sequence
  L63P/S72G/M87A/L98Q/Y105L IgV domain
HVAQPAVVLASSRGIASFVCEYASPGKATEVRVTVLRQADSQVTEVCAATYMMGNELTFPDDSICTGTGSGNQVNLTIQGLRAADTGLYICKVEQMYPPPYL

SEQ ID NO: 270 - protein, 102 aa, Artificial Sequence
  A26D/S72G/L98Q/M99L/Y105L IgV domain
HVAQPAVVLASSRGIASFVCEYDSPGKATEVRVTVLRQADSQVTEVCAATYMMGNELTFLDDSICTGTGSGNQVNLTIQGLRAMDTGLYICKVEQLYPPPYL

SEQ ID NO: 271 - protein, 102 aa, Artificial Sequence
  V22A/L63P/L98Q/M99L/Y105L IgV domain
HVAQPAVVLASSRGIASFACEYASPGKATEVRVTVLRQADSQVTEVCAATYMMGNELTFPDDSICTGTSSGNQVNLTIQGLRAMDTGLYICKVEQLYPPPYL

SEQ ID NO: 272 - protein, 102 aa, Artificial Sequence
  A26T/M55T/L63P/L98Q/M99L/Y105L IgV domain
HVAQPAVVLASSRGIASFVCEYTSPGKATEVRVTVLRQADSQVTEVCAATYTMGNELTFPDDSICTGTSSGNQVNLTIQGLRAMDTGLYICKVEQLYPPPYL

SEQ ID NO: 273 - protein, 102 aa, Artificial Sequence
  E33V/A42S/M55T/L98Q/M99L/Y105L IgV domain
HVAQPAVVLASSRGIASFVCEYASPGKATVVRVTVLRQSDSQVTEVCAATYTMGNELTFLDDSICTGTSSGNQVNLTIQGLRAMDTGLYICKVEQLYPPPYL

SEQ ID NO: 274 - protein, 102 aa, Artificial Sequence
  G29W/N58S/L63P/Q82R/L98Q/Y105L IgV domain
HVAQPAVVLASSRGIASFVCEYASPWKATEVRVTVLRQADSQVTEVCAATYMMGSELTFPDDSICTGTSSGNQVNLTIRGLRAMDTGLYICKVEQMYPPPYL

SEQ ID NO: 275 - protein, 102 aa, Artificial Sequence
  A26T/I67N/S72G/L98Q/M99L/Y105L IgV domain
HVAQPAVVLASSRGIASFVCEYTSPGKATEVRVTVLRQADSQVTEVCAATYMMGNELTFLDDSNCTGTGSGNQVNLTIQGLRAMDTGLYICKVEQLYPPPYL

SEQ ID NO: 276 - protein, 102 aa, Artificial Sequence
  L12F/A26T/L63P/L98Q/Y105L IgV domain
HVAQPAVVFASSRGIASFVCEYTSPGKATEVRVTVLRQADSQVTEVCAATYMMGNELTFPDDSICTGTSSGNQVNLTIQGLRAMDTGLYICKVEQMYPPPYL

SEQ ID NO: 277 - protein, 102 aa, Artificial Sequence
  S20N/A26T/L63P/L98Q/M99L/Y105L IgV domain
HVAQPAVVLASSRGIANFVCEYTSPGKATEVRVTVLRQADSQVTEVCAATYMMGNELTFPDDSICTGTSSGNQVNLTIQGLRAMDTGLYICKVEQLYPPPYL

SEQ ID NO: 278 - protein, 102 aa, Artificial Sequence
  G29W/M87K/T89S/L98Q/M99L/Y105L IgV domain
HVAQPAVVLASSRGIASFVCEYASPWKATEVRVTVLRQADSQVTEVCAATYMMGNELTFLDDSICTGTSSGNQVNLTIQGLRAKDSGLYICKVEQLYPPPYL

SEQ ID NO: 279 - protein, 102 aa, Artificial Sequence
  G29W/T61I/L63P/S72G/L98Q/M99L/Y105L IgV domain
HVAQPAVVLASSRGIASFVCEYASPWKATEVRVTVLRQADSQVTEVCAATYMMGNELIFPDDSICTGTGSGNQVNLTIQGLRAMDTGLYICKVEQLYPPPYL

SEQ ID NO: 280 - protein, 102 aa, Artificial Sequence
  G29W/N58S/L63P/T69I/L98Q/M99L/Y105L IgV domain
HVAQPAVVLASSRGIASFVCEYASPWKATEVRVTVLRQADSQVTEVCAATYMMGSELTFPDDSICIGTSSGNQVNLTIQGLRAMDTGLYICKVEQLYPPPYL

SEQ ID NO: 281 - protein, 102 aa, Artificial Sequence
  L12P/L63P/S72G/L98Q/M99L/Y105L IgV domain
HVAQPAVVPASSRGIASFVCEYASPGKATEVRVTVLRQADSQVTEVCAATYMMGNELTFPDDSICTGTGSGNQVNLTIQGLRAMDTGLYICKVEQLYPPPYL

SEQ ID NO: 282 - protein, 102 aa, Artificial Sequence
  L63P/T69A/L98Q/M99L/Y105L IgV domain
HVAQPAVVLASSRGIASFVCEYASPGKATEVRVTVLRQADSQVTEVCAATYMMGNELTFPDDSICAGTSSGNQVNLTIQGLRAMDTGLYICKVEQLYPPPYL

SEQ ID NO: 283 - protein, 102 aa, Artificial Sequence
  G29W/N58S/L63P/S72G/L98Q/Y105L IgV domain
HVAQPAVVLASSRGIASFVCEYASPWKATEVRVTVLRQADSQVTEVCAATYMMGSELTFPDDSICTGTGSGNQVNLTIQGLRAMDTGLYICKVEQMYPPPYL

SEQ ID NO: 284 - protein, 102 aa, Artificial Sequence
  T53S/M56V/L98Q/Y105L IgV domain
HVAQPAVVLASSRGIASFVCEYASPGKATEVRVTVLRQADSQVTEVCAASYMVGNELTFLDDSICTGTSSGNQVNLTIQGLRAMDTGLYICKVEQMYPPPYL

SEQ ID NO: 285 - protein, 102 aa, Artificial Sequence
  L63P/S72G/L98Q/Y105L IgV domain
HVAQPAVVLASSRGIASFVCEYASPGKATEVRVTVLRQADSQVTEVCAATYMMGNELTFPDDSICTGTGSGNQVNLTIQGLRAMDTGLYICKVEQMYPPPYL

SEQ ID NO: 286 - protein, 102 aa, Artificial Sequence
  I18A/L63P/S72G/L98Q/Y105L IgV domain
HVAQPAVVLASSRGAASFVCEYASPGKATEVRVTVLRQADSQVTEVCAATYMMGNELTFPDDSICTGTGSGNQVNLTIQGLRAMDTGLYICKVEQMYPPPYL

SEQ ID NO: 287 - protein, 102 aa, Artificial Sequence
  G29W/T53S/M56K/L63P/L98Q/Y105L IgV domain
HVAQPAVVLASSRGIASFVCEYASPWKATEVRVTVLRQADSQVTEVCAASYMKGNELTFPDDSICTGTSSGNQVNLTIQGLRAMDTGLYICKVEQMYPPPYL

SEQ ID NO: 288 - protein, 102 aa, Artificial Sequence
  I18V/G29W/L63P/S72G/L98Q/Y105L IgV domain
HVAQPAVVLASSRGVASFVCEYASPWKATEVRVTVLRQADSQVTEVCAATYMMGNELTFPDDSICTGTGSGNQVNLTIQGLRAMDTGLYICKVEQMYPPPYL

SEQ ID NO: 289 - protein, 102 aa, Artificial Sequence
  G29W/L63P/S72G/L98Q/Y105L IgV domain
HVAQPAVVLASSRGIASFVCEYASPWKATEVRVTVLRQADSQVTEVCAATYMMGNELTFPDDSICTGTGSGNQVNLTIQGLRAMDTGLYICKVEQMYPPPYL

SEQ ID NO: 290 - protein, 102 aa, Artificial Sequence
  G29W/L63P/I67V/S72G/L98Q/Y105L IgV domain
HVAQPAVVLASSRGIASFVCEYASPWKATEVRVTVLRQADSQVTEVCAATYMMGNELTFPDDSVCTGTGSGNQVNLTIQGLRAMDTGLYICKVEQMYPPPYL

SEQ ID NO: 291 - protein, 102 aa, Artificial Sequence
  G29W/M55V/E59G/L63P/L98Q/Y105L IgV domain
HVAQPAVVLASSRGIASFVCEYASPWKATEVRVTVLRQADSQVTEVCAATYVMGNGLTFPDDSICTGTSSGNQVNLTIQGLRAMDTGLYICKVEQMYPPPYL

SEQ ID NO: 292 - protein, 102 aa, Artificial Sequence
  L12F/R16H/G29W/M56T/L98Q/Y105L IgV domain
HVAQPAVVFASSHGIASFVCEYASPWKATEVRVTVLRQADSQVTEVCAATYMTGNELTFLDDSICTGTSSGNQVNLTIQGLRAMDTGLYICKVEQMYPPPYL

SEQ ID NO: 293 - protein, 102 aa, Artificial Sequence
  L12P/G29W/L63P/S72G/L98Q/Y105L IgV domain
HVAQPAVVPASSRGIASFVCEYASPWKATEVRVTVLRQADSQVTEVCAATYMMGNELTFPDDSICTGTGSGNQVNLTIQGLRAMDTGLYICKVEQMYPPPYL

SEQ ID NO: 294 - protein, 102 aa, Artificial Sequence
  A26T/T53S/L63P/L98Q/Y105L IgV domain
HVAQPAVVLASSRGIASFVCEYTSPGKATEVRVTVLRQADSQVTEVCAASYMMGNELTFPDDSICTGTSSGNQVNLTIQGLRAMDTGLYICKVEQMYPPPYL

SEQ ID NO: 295 - protein, 102 aa, Artificial Sequence
  G29W/N58S/L63P/S72G/M87V/L98Q/Y105L IgV domain
HVAQPAVVLASSRGIASFVCEYASPWKATEVRVTVLRQADSQVTEVCAATYMMGSELTFPDDSICTGTGSGNQVNLTIQGLRAVDTGLYICKVEQMYPPPYL

SEQ ID NO: 296 - protein, 102 aa, Artificial Sequence
  G29W/S72G/Q76R/L98Q/Y105L IgV domain
HVAQPAVVLASSRGIASFVCEYASPWKATEVRVTVLRQADSQVTEVCAATYMMGNELTFLDDSICTGTGSGNRVNLTIQGLRAMDTGLYICKVEQMYPPPYL

SEQ ID NO: 297 - protein, 102 aa, Artificial Sequence
  A26T/L63P/L98Q/M99L/Y105L IgV domain
HVAQPAVVLASSRGIASFVCEYTSPGKATEVRVTVLRQADSQVTEVCAATYMMGNELTFPDDSICTGTSSGNQVNLTIQGLRAMDTGLYICKVEQLYPPPYL

SEQ ID NO: 298 - protein, 102 aa, Artificial Sequence
  G29W/N58D/I67V/L98Q/M99L/Y105L IgV domain
HVAQPAVVLASSRGIASFVCEYASPWKATEVRVTVLRQADSQVTEVCAATYMMGDELTFLDDSVCTGTSSGNQVNLTIQGLRAMDTGLYICKVEQLYPPPYL

SEQ ID NO: 299 - protein, 102 aa, Artificial Sequence
  I67V/S72G/Q82H/T89A/L98Q/M99L/Y105L IgV domain
HVAQPAVVLASSRGIASFVCEYASPGKATEVRVTVLRQADSQVTEVCAATYMMGNELTFLDDSVCTGTGSGNQVNLTIHGLRAMDAGLYICKVEQLYPPPYL

SEQ ID NO: 300 - protein, 102 aa, Artificial Sequence
  S72G/R85G/L98Q/M99L/Y105L IgV domain
HVAQPAVVLASSRGIASFVCEYASPGKATEVRVTVLRQADSQVTEVCAATYMMGNELTFLDDSICTGTGSGNQVNLTIQGLGAMDTGLYICKVEQLYPPPYL

SEQ ID NO: 301 - protein, 102 aa, Artificial Sequence
  A26T/T47A/M56K/L63P/S72G/Q82R/L98Q/M99L/Y105L IgV domain
HVAQPAVVLASSRGIASFVCEYTSPGKATEVRVTVLRQADSQVAEVCAATYMKGNELTFPDDSICTGTGSGNQVNLTIRGLRAMDTGLYICKVEQLYPPPYL

SEQ ID NO: 302 - protein, 102 aa, Artificial Sequence
  A26T/M55T/L63P/S72G/L98Q/M99L/Y105L IgV domain
HVAQPAVVLASSRGIASFVCEYTSPGKATEVRVTVLRQADSQVTEVCAATYTMGNELTFPDDSICTGTGSGNQVNLTIQGLRAMDTGLYICKVEQLYPPPYL

SEQ ID NO: 303 - protein, 102 aa, Artificial Sequence
  L12H/I18V/A42T/M55T/N58D/L98R/Y105L IgV domain
HVAQPAVVHASSRGVASFVCEYASPGKATEVRVTVLRQTDSQVTEVCAATYTMGDELTFLDDSICTGTSSGNQVNLTIQGLRAMDTGLYICKVERMYPPPYL

SEQ ID NO: 304 - protein, 102 aa, Artificial Sequence
  I18T/A26T/L63P/S72G/L98Q/Y105L IgV domain
HVAQPAVVLASSRGTASFVCEYTSPGKATEVRVTVLRQADSQVTEVCAATYMMGNELTFPDDSICTGTGSGNQVNLTIQGLRAMDTGLYICKVEQMYPPPYL

SEQ ID NO: 305 - protein, 102 aa, Artificial Sequence
  L12F/K30R/S72G/Q82R/L98Q/M99L/Y105L IgV domain
HVAQPAVVFASSRGIASFVCEYASPGRATEVRVTVLRQADSQVTEVCAATYMMGNELTFLDDSICTGTGSGNQVNLTIRGLRAMDTGLYICKVEQLYPPPYL

SEQ ID NO: 306 - protein, 102 aa, Artificial Sequence
  G29W/M87K/I93V/L98Q/M99L/Y105L IgV domain
HVAQPAVVLASSRGIASFVCEYASPWKATEVRVTVLRQADSQVTEVCAATYMMGNELTFLDDSICTGTSSGNQVNLTIQGLRAKDTGLYVCKVEQLYPPPYL

SEQ ID NO: 307 - protein, 102 aa, Artificial Sequence
  P28L/E33V/L63P/S72G/L98Q/M99L/Y105L IgV domain
HVAQPAVVLASSRGIASFVCEYASLGKATVVRVTVLRQADSQVTEVCAATYMMGNELTFPDDSICTGTGSGNQVNLTIQGLRAMDTGLYICKVEQLYPPPYL

SEQ ID NO: 308 - protein, 102 aa, Artificial Sequence
  G29W/T53S/M56K/L63P/Q82H/L98Q/M99I/Y105L IgV domain
HVAQPAVVLASSRGIASFVCEYASPWKATEVRVTVLRQADSQVTEVCAASYMKGNELTFPDDSICTGTSSGNQVNLTIHGLRAMDTGLYICKVEQIYPPPYL

SEQ ID NO: 309 - protein, 102 aa, Artificial Sequence
  I18F/L63P/L98Q/M99L/Y105L IgV domain
HVAQPAVVLASSRGFASFVCEYASPGKATEVRVTVLRQADSQVTEVCAATYMMGNELTFPDDSICTGTSSGNQVNLTIQGLRAMDTGLYICKVEQLYPPPYL

SEQ ID NO: 310 - protein, 102 aa, Artificial Sequence
  A26T/A42V/Q45H/I67N/M87K/E97Q/M99L IgV domain
HVAQPAVVLASSRGIASFVCEYTSPGKATEVRVTVLRQVDSHVTEVCAATYMMGNELTFLDDSNCTGTSSGNQVNLTIQGLRAKDTGLYICKVQLLYPPPYY

SEQ ID NO: 311 - protein, 102 aa, Artificial Sequence
  M56V/E59G/L63P/S72G/M87K/I93V/L98Q/M99L/Y105L IgV domain
HVAQPAVVLASSRGIASFVCEYASPGKATEVRVTVLRQADSQVTEVCAATYMVGNGLTFPDDSICTGTGSGNQVNLTIQGLRAKDTGLYVCKVEQLYPPPYL

SEQ ID NO: 312 - protein, 102 aa, Artificial Sequence
  L12P/M56V/L63P/V96I/L98Q/M99L/Y105L IgV domain
HVAQPAVVPASSRGIASFVCEYASPGKATEVRVTVLRQADSQVTEVCAATYMVGNELTFPDDSICTGTSSGNQVNLTIQGLRAMDTGLYICKIEQLYPPPYL

SEQ ID NO: 313 - protein, 102 aa, Artificial Sequence
  G29W/T53S/M56K/T61N/L63P/L98Q/Y105L IgV domain
HVAQPAVVLASSRGIASFVCEYASPWKATEVRVTVLRQADSQVTEVCAASYMKGNELNFPDDSICTGTSSGNQVNLTIQGLRAMDTGLYICKVEQMYPPPYL

SEQ ID NO: 314 - protein, 102 aa, Artificial Sequence
  I18T/A26S/M55T/M56V/L63P/S72G/L98Q/M99L/Y105L IgV domain
HVAQPAVVLASSRGTASFVCEYSSPGKATEVRVTVLRQADSQVTEVCAATYTVGNELTFPDDSICTGTGSGNQVNLTIQGLRAMDTGLYICKVEQLYPPPYL

SEQ ID NO: 315 - protein, 102 aa, Artificial Sequence
  I18T/T61R/L63P/S72G/L98Q/M99L/Y105L IgV domain
HVAQPAVVLASSRGTASFVCEYASPGKATEVRVTVLRQADSQVTEVCAATYMMGNELRFPDDSICTGTGSGNQVNLTIQGLRAMDTGLYICKVEQLYPPPYL

SEQ ID NO: 316 - protein, 102 aa, Artificial Sequence; identical to SEQ ID NO: 281
  L12P/L63P/S72G/L98Q/M99L/Y105L IgV domain

SEQ ID NO: 317 - protein, 102 aa, Artificial Sequence
  L12P/R16H/A26T/T61S/L63P/M87V/L98Q/M99L/Y105L IgV domain
HVAQPAVVPASSHGIASFVCEYTSPGKATEVRVTVLRQADSQVTEVCAATYMMGNELSFPDDSICTGTSSGNQVNLTIQGLRAVDTGLYICKVEQLYPPPYL

SEQ ID NO: 318 - protein, 102 aa, Artificial Sequence
  G29W/T53S/M56K/N58S/L63P/M87V/L98Q/Y105L IgV domain
HVAQPAVVLASSRGIASFVCEYASPWKATEVRVTVLRQADSQVTEVCAASYMKGSELTFPDDSICTGTSSGNQVNLTIQGLRAVDTGLYICKVEQMYPPPYL

SEQ ID NO: 319 - protein, 102 aa, Artificial Sequence
  G29W/T53S/L63P/S72G/L98Q/Y105L IgV domain
HVAQPAVVLASSRGIASFVCEYASPWKATEVRVTVLRQADSQVTEVCAASYMMGNELTFPDDSICTGTGSGNQVNLTIQGLRAMDTGLYICKVEQMYPPPYL

SEQ ID NO: 320 - protein, 102 aa, Artificial Sequence
  V10A/G29W/T53S/M56K/L63P/L98Q/Y105L IgV domain
HVAQPAAVLASSRGIASFVCEYASPWKATEVRVTVLRQADSQVTEVCAASYMKGNELTFPDDSICTGTSSGNQVNLTIQGLRAMDTGLYICKVEQMYPPPYL

SEQ ID NO: 321 - protein, 102 aa, Artificial Sequence
  CTLA-4 IgV
HVAQPAVVLASSRGIASFVCEYASPGKYTEVRVTVLRQADSQVTEVCAATYMMGNELTFLDDSICTGTSSGNQVNLTIQGLRAMDTGLYICKVELMYPPPYY

SEQ ID NO: 322 - protein, 102 aa, Artificial sequence
  T89A/L98Q/M99L/Y105L/L106I/Y115N/E120D/C122P/D124P/S125I/D126P IgV domain
HVAQPAVVLASSRGIASFVCEYASPGKATEVRVTVLRQADSQVTEVCAATYMMGNELTFLDDSICTGTSSGNQVNLTIQGLRAMDAGLYICKVEQLYPPPYL

SEQ ID NO: 323 - protein, 102 aa, Artificial sequence
  N58S/L63P/T71A/S72G/L98Q/M99L/Y105L/D124I/S125P/D126T IgV domain
HVAQPAVVLASSRGIASFVCEYASPGKATEVRVTVLRQADSQVTEVCAATYMMGSELTFPDDSICTGAGSGNQVNLTIQGLRAMDTGLYICKVEQLYPPPYL

SEQ ID NO: 324 - protein, 102 aa, Artificial sequence
  R16G/E33M/N58S/E59G/L63P/L98Q/Y105L/E120D/C122P/D124P/S125I/D126P IgV
HVAQPAVVLASSGGIASFVCEYASPGKATMVRVTVLRQADSQVTEVCAATYMMGSGLTFPDDSICTGTSSGNQVNLTIQGLRAMDTGLYICKVEQMYPPPYL

SEQ ID NO: 325 - protein, 102 aa, Artificial sequence; identical to SEQ ID NO: 289
  G29W/L63P/S72G/L98Q/Y105L/P121S/D126T IgV domain

SEQ ID NO: 326 - protein, 102 aa, Artificial sequence
  L12H/E33M/L98Q/Y105L IgV domain
HVAQPAVVHASSRGIASFVCEYASPGKATMVRVTVLRQADSQVTEVCAATYMMGNELTFLDDSICTGTSSGNQVNLTIQGLRAMDTGLYICKVEQMYPPPYL

SEQ ID NO: 327 - protein, 102 aa, Artificial sequence
  T53S/M56K/N58S/L63P/M87V/L98Q/Y105L IgV domain
HVAQPAVVLASSRGIASFVCEYASPGKATEVRVTVLRQADSQVTEVCAASYMKGSELTFPDDSICTGTSSGNQVNLTIQGLRAVDTGLYICKVEQMYPPPYL

SEQ ID NO: 328 - protein, 102 aa, Artificial sequence
  I18T/A26T/M55T/M56K/L63P/L98Q/ M99L/Y105L IgV domain
HVAQPAVVLASSRGTASFVCEYTSPGKATEVRVTVLRQADSQVTEVCAATYTKGNELTFPDDSICTGTSSGNQVNLTIQGLRAMDTGLYICKVEQLYPPPYL

SEQ ID NO: 329 - protein, 102 aa, Artificial sequence
  I18T/A26T/M56K/L63P/L98Q/Y105L IgV domain
HVAQPAVVLASSRGTASFVCEYTSPGKATEVRVTVLRQADSQVTEVCAATYMKGNELTFPDDSICTGTSSGNQVNLTIQGLRAMDTGLYICKVEQMYPPPYL

SEQ ID NO: 330 - protein, 102 aa, Artificial sequence
  T53S/L63P/L98Q IgV domain
HVAQPAVVLASSRGIASFVCEYASPGKATEVRVTVLRQADSQVTEVCAASYMMGNELTFPDDSICTGTSSGNQVNLTIQGLRAMDTGLYICKVEQMYPPPYY

SEQ ID NO: 331 - protein, 102 aa, Artificial sequence
  T53S/L63P/Y105L IgV domain
HVAQPAVVLASSRGIASFVCEYASPGKATEVRVTVLRQADSQVTEVCAASYMMGNELTFPDDSICTGTSSGNQVNLTIQGLRAMDTGLYICKVELMYPPPYL

SEQ ID NO: 332 - protein, 102 aa, Artificial sequence
  T53S/M56K/N58S/L63P/M87V/L98Q IgV domain
HVAQPAVVLASSRGIASFVCEYASPGKATEVRVTVLRQADSQVTEVCAASYMKGSELTFPDDSICTGTSSGNQVNLTIQGLRAVDTGLYICKVEQMYPPPYY

SEQ ID NO: 333 - protein, 102 aa, Artificial sequence
  T53S/M56K/N58S/L63P/M87V/Y105L IgV domain
HVAQPAVVLASSRGIASFVCEYASPGKATEVRVTVLRQADSQVTEVCAASYMKGSELTFPDDSICTGTSSGNQVNLTIQGLRAVDTGLYICKVELMYPPPYL

SEQ ID NO: 334 - protein, 102 aa, Artificial sequence
  T53S/M56K/N58S/L63P/L98Q/Y105L IgV domain
HVAQPAVVLASSRGIASFVCEYASPGKATEVRVTVLRQADSQVTEVCAASYMKGSELTFPDDSICTGTSSGNQVNLTIQGLRAMDTGLYICKVEQMYPPPYL

SEQ ID NO: 335 - protein, 102 aa, Artificial sequence
  T53S/M56K/N58S/M87V/L98Q/Y105L IgV domain
HVAQPAVVLASSRGIASFVCEYASPGKATEVRVTVLRQADSQVTEVCAASYMKGSELTFLDDSICTGTSSGNQVNLTIQGLRAVDTGLYICKVEQMYPPPYL

SEQ ID NO: 336 - protein, 102 aa, Artificial sequence
  T53S/M56K/L63P/M87V/L98Q/Y105L IgV domain
HVAQPAVVLASSRGIASFVCEYASPGKATEVRVTVLRQADSQVTEVCAASYMKGNELTFPDDSICTGTSSGNQVNLTIQGLRAVDTGLYICKVEQMYPPPYL

SEQ ID NO: 337 - protein, 102 aa, Artificial sequence
  T53S/N58S/L63P/M87V/L98Q/Y105L IgV domain
HVAQPAVVLASSRGIASFVCEYASPGKATEVRVTVLRQADSQVTEVCAASYMMGSELTFPDDSICTGTSSGNQVNLTIQGLRAVDTGLYICKVEQMYPPPYL

SEQ ID NO: 338 - protein, 102 aa, Artificial sequence
  M56K/N58S/L63P/M87V/L98Q/Y105L IgV domain
HVAQPAVVLASSRGIASFVCEYASPGKATEVRVTVLRQADSQVTEVCAATYMKGSELTFPDDSICTGTSSGNQVNLTIQGLRAVDTGLYICKVEQMYPPPYL

SEQ ID NO: 339 - protein, 102 aa, Artificial sequence
  E33V/L98Q/Y105L IgV domain
HVAQPAVVLASSRGIASFVCEYASPGKATVVRVTVLRQADSQVTEVCAATYMMGNELTFLDDSICTGTSSGNQVNLTIQGLRAMDTGLYICKVEQMYPPPYL

SEQ ID NO: 340 - protein, 102 aa, Artificial sequence
  E33V/M99L/Y105L IgV domain
HVAQPAVVLASSRGIASFVCEYASPGKATVVRVTVLRQADSQVTEVCAATYMMGNELTFLDDSICTGTSSGNQVNLTIQGLRAMDTGLYICKVELLYPPPYL

SEQ ID NO: 341 - protein, 102 aa, Artificial sequence
  E33V/L98Q/M99L  IgV domain
HVAQPAVVLASSRGIASFVCEYASPGKATVVRVTVLRQADSQVTEVCAATYMMGNELTFLDDSICTGTSSGNQVNLTIQGLRAMDTGLYICKVEQLYPPPYY

SEQ ID NO: 342 - protein, 102 aa, Artificial sequence
  E33V/M99L IgV domain
HVAQPAVVLASSRGIASFVCEYASPGKATVVRVTVLRQADSQVTEVCAATYMMGNELTFLDDSICTGTSSGNQVNLTIQGLRAMDTGLYICKVELLYPPPYY

SEQ ID NO: 343 - protein, 102 aa, Artificial sequence
  L12F/R16H/G29W/M56T/L98Q IgV domain
HVAQPAVVFASSHGIASFVCEYASPWKATEVRVTVLRQADSQVTEVCAATYMTGNELTFLDDSICTGTSSGNQVNLTIQGLRAMDTGLYICKVEQMYPPPYY

SEQ ID NO: 344 - protein, 102 aa, Artificial sequence
  L12F/R16H/G29W/M56T/Y105L IgV domain
HVAQPAVVFASSHGIASFVCEYASPWKATEVRVTVLRQADSQVTEVCAATYMTGNELTFLDDSICTGTSSGNQVNLTIQGLRAMDTGLYICKVELMYPPPYL

SEQ ID NO: 345 - protein, 102 aa, Artificial sequence
  L12F/R16H/G29W/L98Q/Y105L IgV domain
HVAQPAVVFASSHGIASFVCEYASPWKATEVRVTVLRQADSQVTEVCAATYMMGNELTFLDDSICTGTSSGNQVNLTIQGLRAMDTGLYICKVEQMYPPPYL

SEQ ID NO: 346 - protein, 102 aa, Artificial sequence
  L12F/R16H/M56T/L98Q/Y105L IgV domain
HVAQPAVVFASSHGIASFVCEYASPGKATEVRVTVLRQADSQVTEVCAATYMTGNELTFLDDSICTGTSSGNQVNLTIQGLRAMDTGLYICKVEQMYPPPYL

SEQ ID NO: 347 - protein, 102 aa, Artificial sequence
  G29W/M56T/L98Q/Y105L IgV domain
HVAQPAVVLASSRGIASFVCEYASPWKATEVRVTVLRQADSQVTEVCAATYMTGNELTFLDDSICTGTSSGNQVNLTIQGLRAMDTGLYICKVEQMYPPPYL

SEQ ID NO: 348 - protein, 102 aa, Artificial sequence
  L12F/G29W/L98Q/Y105L IgV domain
HVAQPAVVFASSRGIASFVCEYASPWKATEVRVTVLRQADSQVTEVCAATYMMGNELTFLDDSICTGTSSGNQVNLTIQGLRAMDTGLYICKVEQMYPPPYL

SEQ ID NO: 349 - protein, 102 aa, Artificial sequence
  L12F/L98Q/Y105L IgV domain
HVAQPAVVFASSRGIASFVCEYASPGKATEVRVTVLRQADSQVTEVCAATYMMGNELTFLDDSICTGTSSGNQVNLTIQGLRAMDTGLYICKVEQMYPPPYL

SEQ ID NO: 350 - protein, 102 aa, Artificial sequence
  R16H/L98Q/Y105L IgV domain
HVAQPAVVLASSHGIASFVCEYASPGKATEVRVTVLRQADSQVTEVCAATYMMGNELTFLDDSICTGTSSGNQVNLTIQGLRAMDTGLYICKVEQMYPPPYL

SEQ ID NO: 351 - protein, 102 aa, Artificial sequence
  G29W/L98Q/Y105L IgV domain
HVAQPAVVLASSRGIASFVCEYASPWKATEVRVTVLRQADSQVTEVCAATYMMGNELTFLDDSICTGTSSGNQVNLTIQGLRAMDTGLYICKVEQMYPPPYL

SEQ ID NO: 352 - protein, 102 aa, Artificial sequence
  M56T/L98Q/Y105L IgV domain
HVAQPAVVLASSRGIASFVCEYASPGKATEVRVTVLRQADSQVTEVCAATYMTGNELTFLDDSICTGTSSGNQVNLTIQGLRAMDTGLYICKVEQMYPPPYL

SEQ ID NO: 353 - protein, 102 aa, Artificial sequence
  L12F/R16H/G29W/M56T/S72G/L98Q/Y105L IgV domain
HVAQPAVVFASSHGIASFVCEYASPWKATEVRVTVLRQADSQVTEVCAATYMTGNELTFLDDSICTGTGSGNQVNLTIQGLRAMDTGLYICKVEQMYPPPYL

SEQ ID NO: 354 - protein, 102 aa, Artificial sequence
  G29W/M56T/S72G/L98Q/Y105L IgV domain
HVAQPAVVLASSRGIASFVCEYASPWKATEVRVTVLRQADSQVTEVCAATYMTGNELTFLDDSICTGTGSGNQVNLTIQGLRAMDTGLYICKVEQMYPPPYL

SEQ ID NO: 355 - protein, 102 aa, artificial sequence
  I18T, T61R, L63P, S72G, L98Q, M99L, P102L, Y105L IgV domain
HVAQPAVVLASSRGTASFVCEYASPGKATEVRVTVLRQADSQVTEVCAATYMMGNELRFPDDSICTGTGSGNQVNLTIQGLRAMDTGLYICKVEQLYPLPYL

SEQ ID NO: 356 - protein, 53 aa, artificial sequence
  BCMA WT ECD
LQMAGQCSQNEYFDSLLHACIPCQLRCSSNTPPLTCQRYCNASVTNSVKGTNA

SEQ ID NO: 357 - protein, 53 aa, artificial sequence
  BCMA H19Y ECD
LQMAGQCSQNEYFDSLLYACIPCQLRCSSNTPPLTCQRYCNASVTNSVKGTNA

SEQ ID NO: 358 - protein, 53 aa, artificial sequence
  BCMA H19Y, S30G ECD
LQMAGQCSQNEYFDSLLYACIPCQLRCSGNTPPLTCQRYCNASVTNSVKGTNA

SEQ ID NO: 359 - protein, 53 aa, artificial sequence
  BCMA H19Y, V45A ECD
LQMAGQCSQNEYFDSLLYACIPCQLRCSSNTPPLTCQRYCNASATNSVKGTNA

SEQ ID NO: 360 - protein, 53 aa, artificial sequence
  BCMA F14Y, H19Y ECD
LQMAGQCSQNEYYDSLLYACIPCQLRCSSNTPPLTCQRYCNASVTNSVKGTNA

SEQ ID NO: 361 - protein, 53 aa, ARTIFICIAL SEQUENCE
  BCMA H19Y, V45D ECD
LQMAGQCSQNEYFDSLLYACIPCQLRCSSNTPPLTCQRYCNASDTNSVKGTNA

SEQ ID NO: 362 - protein, 53 aa, ARTIFICIAL SEQUENCE
  BCMA H19Y, A43E ECD
LQMAGQCSQNEYFDSLLYACIPCQLRCSSNTPPLTCQRYCNESVTNSVKGTNA

SEQ ID NO: 363 - protein, 53 aa, ARTIFICIAL SEQUENCE
  BCMA H19Y, T36A ECD
LQMAGQCSQNEYFDSLLYACIPCQLRCSSNTPPLACQRYCNASVTNSVKGTNA

SEQ ID NO: 364 - protein, 53 aa, ARTIFICIAL SEQUENCE
  BCMA H19Y, I22V ECD
LQMAGQCSQNEYFDSLLYACVPCQLRCSSNTPPLTCQRYCNASVTNSVKGTNA

SEQ ID NO: 365 - protein, 53 aa, ARTIFICIAL SEQUENCE
  BCMA N11D, H19Y ECD
LQMAGQCSQDEYFDSLLYACIPCQLRCSSNTPPLTCQRYCNASVTNSVKGTNA

SEQ ID NO: 366 - protein, 53 aa, ARTIFICIAL SEQUENCE
  BCMA H19Y, T36M ECD
LQMAGQCSQNEYFDSLLYACIPCQLRCSSNTPPLMCQRYCNASVTNSVKGTNA

SEQ ID NO: 367 - protein, 53 aa, ARTIFICIAL SEQUENCE
  BCMA N11S, H19Y ECD
LQMAGQCSQSEYFDSLLYACIPCQLRCSSNTPPLTCQRYCNASVTNSVKGTNA

SEQ ID NO: 368 - protein, 53 aa, ARTIFICIAL SEQUENCE
  BCMA H19Y, L35P, T46A ECD
LQMAGQCSQNEYFDSLLYACIPCQLRCSSNTPPPTCQRYCNASVANSVKGTNA

SEQ ID NO: 369 - protein, 53 aa, ARTIFICIAL SEQUENCE
  BCMA H19Y, N47D ECD
LQMAGQCSQNEYFDSLLYACIPCQLRCSSNTPPLTCQRYCNASVTDSVKGTNA

SEQ ID NO: 370 - protein, 53 aa, ARTIFICIAL SEQUENCE
  BCMA S9D, H19Y ECD
LQMAGQCDQNEYFDSLLYACIPCQLRCSSNTPPLTCQRYCNASVTNSVKGTNA

SEQ ID NO: 371 - protein, 53 aa, ARTIFICIAL SEQUENCE
  BCMA H19Y, S30G, V45D ECD
LQMAGQCSQNEYFDSLLYACIPCQLRCSGNTPPLTCQRYCNASDTNSVKGTNA

SEQ ID NO: 372 - protein, 53 aa, ARTIFICIAL SEQUENCE
  BCMA H19Y, R39Q ECD
LQMAGQCSQNEYFDSLLYACIPCQLRCSSNTPPLTCQQYCNASVTNSVKGTNA

SEQ ID NO: 373 - protein, 53 aa, ARTIFICIAL SEQUENCE
  BCMA H19Y, L35P ECD
LQMAGQCSQNEYFDSLLYACIPCQLRCSSNTPPPTCQRYCNASVTNSVKGTNA

SEQ ID NO: 374 - protein, 53 aa, ARTIFICIAL SEQUENCE
  BCMA S9D, H19Y, R27H ECD
LQMAGQCDQNEYFDSLLYACIPCQLHCSSNTPPLTCQRYCNASVTNSVKGTNA

SEQ ID NO: 375 - protein, 53 aa, ARTIFICIAL SEQUENCE
  BCMA Q10P, H19Y, Q25H ECD
LQMAGQCSPNEYFDSLLYACIPCHLRCSSNTPPLTCQRYCNASVTNSVKGTNA

SEQ ID NO: 376 - protein, 53 aa, ARTIFICIAL SEQUENCE
  BCMA H19Y, R39L, N47D ECD
LQMAGQCSQNEYFDSLLYACIPCQLRCSSNTPPLTCQLYCNASVTDSVKGTNA

SEQ ID NO: 377 - protein, 53 aa, ARTIFICIAL SEQUENCE
  BCMA N11D, H19Y, N47D ECD
LQMAGQCSQDEYFDSLLYACIPCQLRCSSNTPPLTCQRYCNASVTDSVKGTNA

SEQ ID NO: 378 - protein, 53 aa, ARTIFICIAL SEQUENCE
  BCMA H19Y, T32S ECD
LQMAGQCSQNEYFDSLLYACIPCQLRCSSNSPPLTCQRYCNASVTNSVKGTNA

SEQ ID NO: 379 - protein, 53 aa, ARTIFICIAL SEQUENCE
  BCMA N11S, H19Y, S29P ECD
LQMAGQCSQSEYFDSLLYACIPCQLRCPSNTPPLTCQRYCNASVTNSVKGTNA

SEQ ID NO: 380 - protein, 53 aa, ARTIFICIAL SEQUENCE
  BCMA H19Y, R39Q, N47D ECD
LQMAGQCSQNEYFDSLLYACIPCQLRCSSNTPPLTCQQYCNASVTDSVKGTNA

SEQ ID NO: 381 - protein, 53 aa, ARTIFICIAL SEQUENCE
  BCMA S16A, H19Y, R39Q ECD
LQMAGQCSQNEYFDALLYACIPCQLRCSSNTPPLTCQQYCNASVTNSVKGTNA

SEQ ID NO: 382 - protein, 53 aa, artificial sequence
  BCMA S9N, H19Y, N31K, T46I ECD
LQMAGQCNQNEYFDSLLYACIPCQLRCSSKTPPLTCQRYCNASVINSVKGTNA

SEQ ID NO: 383 - protein, 53 aa, ARTIFICIAL SEQUENCE
  BCMA H19Y, R27L, N31Y, T32S, T36A ECD
LQMAGQCSQNEYFDSLLYACIPCQLLCSSYSPPLACQRYCNASVTNSVKGTNA

SEQ ID NO: 384 - protein, 53 aa, ARTIFICIAL SEQUENCE
  BCMA N11S, H19Y, T46A ECD
LQMAGQCSQSEYFDSLLYACIPCQLRCSSNTPPLTCQRYCNASVANSVKGTNA

SEQ ID NO: 385 - protein, 53 aa, ARTIFICIAL SEQUENCE
  BCMA H19Y, T32I ECD
LQMAGQCSQNEYFDSLLYACIPCQLRCSSNIPPLTCQRYCNASVTNSVKGTNA

SEQ ID NO: 386 - protein, 53 aa, ARTIFICIAL SEQUENCE
  BCMA S9G, H19Y, T36S, A43S ECD
LQMAGQCGQNEYFDSLLYACIPCQLRCSSNTPPLSCQRYCNSSVTNSVKGTNA

SEQ ID NO: 387 - protein, 53 aa, ARTIFICIAL SEQUENCE
  BCMA H19Y, S48G ECD
LQMAGQCSQNEYFDSLLYACIPCQLRCSSNTPPLTCQRYCNASVTNGVKGTNA

SEQ ID NO: 388 - protein, 53 aa, ARTIFICIAL SEQUENCE
  BCMA S9N, H19Y, I22V, N31D ECD
LQMAGQCNQNEYFDSLLYACVPCQLRCSSDTPPLTCQRYCNASVTNSVKGTNA

SEQ ID NO: 389 - protein, 53 aa, ARTIFICIAL SEQUENCE
  BCMA S9N, H19Y, Q25K, N31D ECD
LQMAGQCNQNEYFDSLLYACIPCKLRCSSDTPPLTCQRYCNASVTNSVKGTNA

SEQ ID NO: 390 - protein, 53 aa, ARTIFICIAL SEQUENCE
  BCMA S9G, H19Y, T32S ECD
LQMAGQCGQNEYFDSLLYACIPCQLRCSSNSPPLTCQRYCNASVTNSVKGTNA

SEQ ID NO: 391 - protein, 53 aa, ARTIFICIAL SEQUENCE
  BCMA H19Y, T36A, N47Y ECD
LQMAGQCSQNEYFDSLLYACIPCQLRCSSNTPPLACQRYCNASVTYSVKGTNA

SEQ ID NO: 392 - protein, 53 aa, ARTIFICIAL SEQUENCE
  BCMA H19Y, V45A, T46I ECD
LQMAGQCSQNEYFDSLLYACIPCQLRCSSNTPPLTCQRYCNASAINSVKGTNA

SEQ ID NO: 393 - protein, 53 aa, ARTIFICIAL SEQUENCE
  BCMA H19Y, Q25K, N31D ECD
LQMAGQCSQNEYFDSLLYACIPCKLRCSSDTPPLTCQRYCNASVTNSVKGTNA

SEQ ID NO: 394 - protein, 53 aa, ARTIFICIAL SEQUENCE
  BCMA H19Y, Q25H, R39Q, V45D ECD
LQMAGQCSQNEYFDSLLYACIPCHLRCSSNTPPLTCQQYCNASDTNSVKGTNA

SEQ ID NO: 395 - protein, 53 aa, ARTIFICIAL SEQUENCE
  BCMA H19Y, T32S, N47D ECD
LQMAGQCSQNEYFDSLLYACIPCQLRCSSNSPPLTCQRYCNASVTDSVKGTNA

SEQ ID NO: 396 - protein, 53 aa, ARTIFICIAL SEQUENCE
  BCMA Q10E, H19Y, A20T, T36S ECD
LQMAGQCSENEYFDSLLYTCIPCQLRCSSNTPPLSCQRYCNASVTNSVKGTNA

SEQ ID NO: 397 - protein, 53 aa, ARTIFICIAL SEQUENCE
  BCMA H19Y, T32S, V45I ECD
LQMAGQCSQNEYFDSLLYACIPCQLRCSSNSPPLTCQRYCNASITNSVKGTNA

SEQ ID NO: 398 - protein, 53 aa, ARTIFICIAL SEQUENCE
  BCMA H19A ECD
LQMAGQCSQNEYFDSLLAACIPCQLRCSSNTPPLTCQRYCNASVTNSVKGTNA

SEQ ID NO: 399 - protein, 53 aa, ARTIFICIAL SEQUENCE
  BCMA H19C ECD
LQMAGQCSQNEYFDSLLCACIPCQLRCSSNTPPLTCQRYCNASVTNSVKGTNA

SEQ ID NO: 400 - protein, 53 aa, ARTIFICIAL SEQUENCE
  BCMA H19D ECD
LQMAGQCSQNEYFDSLLDACIPCQLRCSSNTPPLTCQRYCNASVTNSVKGTNA

SEQ ID NO: 401 - protein, 53 aa, ARTIFICIAL SEQUENCE
  BCMA H19E ECD
LQMAGQCSQNEYFDSLLEACIPCQLRCSSNTPPLTCQRYCNASVTNSVKGTNA

SEQ ID NO: 402 - protein, 53 aa, ARTIFICIAL SEQUENCE
  BCMA H19F ECD
LQMAGQCSQNEYFDSLLFACIPCQLRCSSNTPPLTCQRYCNASVTNSVKGTNA

SEQ ID NO: 403 - protein, 53 aa, ARTIFICIAL SEQUENCE
  BCMA H19G ECD
LQMAGQCSQNEYFDSLLGACIPCQLRCSSNTPPLTCQRYCNASVTNSVKGTNA

SEQ ID NO: 404 - protein, 53 aa, ARTIFICIAL SEQUENCE
  BCMA H19I ECD
LQMAGQCSQNEYFDSLLIACIPCQLRCSSNTPPLTCQRYCNASVTNSVKGTNA

SEQ ID NO: 405 - protein, 53 aa, ARTIFICIAL SEQUENCE
  BCMA H19K ECD
LQMAGQCSQNEYFDSLLKACIPCQLRCSSNTPPLTCQRYCNASVTNSVKGTNA

SEQ ID NO: 406 - protein, 53 aa, ARTIFICIAL SEQUENCE
  BCMA H19L ECD
LQMAGQCSQNEYFDSLLLACIPCQLRCSSNTPPLTCQRYCNASVTNSVKGTNA

SEQ ID NO: 407 - protein, 53 aa, ARTIFICIAL SEQUENCE
  BCMA H19M ECD
LQMAGQCSQNEYFDSLLMACIPCQLRCSSNTPPLTCQRYCNASVTNSVKGTNA

SEQ ID NO: 408 - protein, 53 aa, ARTIFICIAL SEQUENCE
  BCMA H19N ECD
LQMAGQCSQNEYFDSLLNACIPCQLRCSSNTPPLTCQRYCNASVTNSVKGTNA

SEQ ID NO: 409 - protein, 53 aa, ARTIFICIAL SEQUENCE
  BCMA H19P ECD
LQMAGQCSQNEYFDSLLPACIPCQLRCSSNTPPLTCQRYCNASVTNSVKGTNA

SEQ ID NO: 410 - protein, 53 aa, ARTIFICIAL SEQUENCE
  BCMA H19Q ECD
LQMAGQCSQNEYFDSLLQACIPCQLRCSSNTPPLTCQRYCNASVTNSVKGTNA

SEQ ID NO: 411 - protein, 53 aa, ARTIFICIAL SEQUENCE
  BCMA H19R ECD
LQMAGQCSQNEYFDSLLRACIPCQLRCSSNTPPLTCQRYCNASVTNSVKGTNA

SEQ ID NO: 412 - protein, 53 aa, ARTIFICIAL SEQUENCE
  BCMA H19S ECD
LQMAGQCSQNEYFDSLLSACIPCQLRCSSNTPPLTCQRYCNASVTNSVKGTNA

SEQ ID NO: 413 - protein, 53 aa, ARTIFICIAL SEQUENCE
  BCMA H19T ECD
LQMAGQCSQNEYFDSLLTACIPCQLRCSSNTPPLTCQRYCNASVTNSVKGTNA

SEQ ID NO: 414 - protein, 53 aa, ARTIFICIAL SEQUENCE
  BCMA H19V ECD
LQMAGQCSQNEYFDSLLVACIPCQLRCSSNTPPLTCQRYCNASVTNSVKGTNA

SEQ ID NO: 415 - protein, 53 aa, ARTIFICIAL SEQUENCE
  BCMA H19W ECD
LQMAGQCSQNEYFDSLLWACIPCQLRCSSNTPPLTCQRYCNASVTNSVKGTNA

SEQ ID NO: 416 - protein, 53 aa, ARTIFICIAL SEQUENCE
  BCMA H19F, Q25E, N31L, L35Y, T36S ECD
LQMAGQCSQNEYFDSLLFACIPCELRCSSLTPPYSCQRYCNASVTNSVKGTNA

SEQ ID NO: 417 - protein, 53 aa, ARTIFICIAL SEQUENCE
  BCMA H19F, Q25F, N31S, T36S ECD
LQMAGQCSQNEYFDSLLFACIPCFLRCSSSTPPLSCQRYCNASVTNSVKGTNA

SEQ ID NO: 418 - protein, 53 aa, ARTIFICIAL SEQUENCE
  BCMA H19I, Q25F, N31S, T36V ECD
LQMAGQCSQNEYFDSLLIACIPCFLRCSSSTPPLVCQRYCNASVTNSVKGTNA

SEQ ID NO: 419 - protein, 53 aa, ARTIFICIAL SEQUENCE
  BCMA H19F, Q25V, N31M, T36S ECD
LQMAGQCSQNEYFDSLLFACIPCVLRCSSMTPPLSCQRYCNASVTNSVKGTNA

SEQ ID NO: 420 - protein, 53 aa, ARTIFICIAL SEQUENCE
  BCMA H19Y, Q25Y, N31L, L35Y, T36S ECD
LQMAGQCSQNEYFDSLLYACIPCYLRCSSLTPPYSCQRYCNASVTNSVKGTNA

SEQ ID NO: 421 - protein, 53 aa, ARTIFICIAL SEQUENCE
  BCMA H19F, Q25I, N31M, L35A, T36S ECD
LQMAGQCSQNEYFDSLLFACIPCILRCSSMTPPASCQRYCNASVTNSVKGTNA

SEQ ID NO: 422 - protein, 53 aa, ARTIFICIAL SEQUENCE
  BCMA H19I, Q25L, N31L, L35Y, T36S ECD
LQMAGQCSQNEYFDSLLIACIPCLLRCSSLTPPYSCQRYCNASVTNSVKGTNA

SEQ ID NO: 423 - protein, 53 aa, ARTIFICIAL SEQUENCE
  BCMA H19F, Q25L, N31G, L35P, T36A ECD
LQMAGQCSQNEYFDSLLFACIPCLLRCSSGTPPPACQRYCNASVTNSVKGTNA

SEQ ID NO: 424 - protein, 53 aa, ARTIFICIAL SEQUENCE
  BCMA H19Y, I22L, N31G ECD
LQMAGQCSQNEYFDSLLYACLPCQLRCSSGTPPLTCQRYCNASVTNSVKGTNA

SEQ ID NO: 425 - protein, 53 aa, ARTIFICIAL SEQUENCE
  BCMA H19F, I22V, Q25M, N31P, T36M ECD
LQMAGQCSQNEYFDSLLFACVPCMLRCSSPTPPLMCQRYCNASVTNSVKGTNA

SEQ ID NO: 426 - protein, 53 aa, ARTIFICIAL SEQUENCE
  BCMA H19Y, N31L, L35Y, T36S ECD
LQMAGQCSQNEYFDSLLYACIPCQLRCSSLTPPYSCQRYCNASVTNSVKGTNA

SEQ ID NO: 427 - protein, 53 aa, ARTIFICIAL SEQUENCE
  BCMA H19L, S30G, N31H, L35A ECD
LQMAGQCSQNEYFDSLLLACIPCQLRCSGHTPPATCQRYCNASVTNSVKGTNA

SEQ ID NO: 428 - protein, 53 aa, ARTIFICIAL SEQUENCE
  BCMA H19L, Q25S, N31V, L35S, T36V ECD
LQMAGQCSQNEYFDSLLLACIPCSLRCSSVTPPSVCQRYCNASVTNSVKGTNA

SEQ ID NO: 429 - protein, 53 aa, ARTIFICIAL SEQUENCE
  BCMA H19L, Q25S, S30Y, N31G, L35M, T36V ECD
LQMAGQCSQNEYFDSLLLACIPCSLRCSYGTPPMVCQRYCNASVTNSVKGTNA

SEQ ID NO: 430 - protein, 53 aa, ARTIFICIAL SEQUENCE
  BCMA H19F, Q25F, N31L, L35Y, T36S ECD
LQMAGQCSQNEYFDSLLFACIPCFLRCSSLTPPYSCQRYCNASVTNSVKGTNA

SEQ ID NO: 431 - protein, 53 aa, ARTIFICIAL SEQUENCE
  BCMA H19F, Q25F, N31S, T36G ECD
LQMAGQCSQNEYFDSLLFACIPCFLRCSSSTPPLGCQRYCNASVTNSVKGTNA

SEQ ID NO: 432 - protein, 53 aa, ARTIFICIAL SEQUENCE
  BCMA H19F, I22V, Q25S, N31V, L35S, T36V ECD
LQMAGQCSQNEYFDSLLFACVPCSLRCSSVTPPSVCQRYCNASVTNSVKGTNA

SEQ ID NO: 433 - protein, 53 aa, ARTIFICIAL SEQUENCE
  BCMA H19F, Q25G, N31S, L35V, T36N ECD
LQMAGQCSQNEYFDSLLFACIPCGLRCSSSTPPVNCQRYCNASVTNSVKGTNA

SEQ ID NO: 434 - protein, 53 aa, ARTIFICIAL SEQUENCE
  BCMA H19L, Q25H, N31D, L35S ECD
LQMAGQCSQNEYFDSLLLACIPCHLRCSSDTPPSTCQQYCNASVTNSVKGTNA

SEQ ID NO: 435 - protein, 53 aa, ARTIFICIAL SEQUENCE
  BCMA H19F, Q25F, N31S, L35Y, T36S ECD
LQMAGQCSQNEYFDSLLFACIPCFLRCSSSTPPYSCQRYCNASVTNSVKGTNA

SEQ ID NO: 436 - DNA, 159 bp, ARTIFICIAL SEQUENCE
  BCMA WT ECD
ctgcaaatggccgggcagtgcagccagaacgaatactttgactccttgttgcacgcatgtattccttgccaactgcgctgttcaagcaacacccccccgctcacgtgtcagcggtactgcaacgcatctgttaccaacagtgtcaaagggactaatgcg

SEQ ID NO: 437 - DNA, 159 bp, ARTIFICIAL SEQUENCE
  BCMA H19Y ECD
ctgcaaatggccgggcagtgcagccagaacgaatactttgactccttgttgtacgcatgtattccttgccaactgcgctgttcaagcaacacccccccgctcacgtgtcagcggtactgcaacgcatctgttaccaacagtgtcaaagggactaatgcg

SEQ ID NO: 438 - DNA, 159 bp, ARTIFICIAL SEQUENCE
  BCMA H19Y, S30G ECD
ctgcaaatggccgggcagtgcagccagaacgaatactttgactcattgttgtacgcatgtattccttgccaactgcgctgttcaggcaacacccccccgctcacgtgtcagcggtactgcaacgcatctgttaccaacagtgtcaaagggactaatgcg

SEQ ID NO: 439 - DNA, 159 bp, ARTIFICIAL SEQUENCE
  BCMA H19Y, V45A ECD
ctgcaaatggccgggcagtgcagccagaacgaatactttgactccttgttgtacgcatgtattccttgccagctgcgctgttcaagcaacacccccccgctcacgtgtcagcggtactgcaacgcatctgctaccaacagtgtcaaagggactaatgcg

SEQ ID NO: 440 - DNA, 159 bp, ARTIFICIAL SEQUENCE
  BCMA F14Y, H19Y ECD
ctgcaaatggccgggcagtgtagccagaacgaatactatgactccttgttgtacgcatgtattccttgccaactgcgctgttcaagcaacacccccccgctcacgtgtcagcggtactgcaacgcatctgttaccaacagtgtcaaagggactaatgcg

SEQ ID NO: 441 - DNA, 159 bp, ARTIFICIAL SEQUENCE
  BCMA H19Y, V45D ECD
ctgcaaatggccgggcagtgcagccagaacgaatactttgactccttgttgtacgcatgtattccttgccaactgcgctgttcaagcaacacccccccgctcacgtgtcagcggtactgcaacgcatccgataccaacagtgtcaaagggactaatgcg

SEQ ID NO: 442 - DNA, 159 bp, ARTIFICIAL SEQUENCE
  BCMA H19Y, A43E ECD
ctgcaaatggccgggcagtgcagccagaacgaatactttgactccttgttgtacgcatgtattccttgccaactgcgctgttcaagcaacacccccccgctcacgtgtcagcggtactgcaacgaatctgttaccaacagtgtcaaagggactaatgcg

SEQ ID NO: 443 - DNA, 159 bp, ARTIFICIAL SEQUENCE
  BCMA H19Y, T36A ECD
ctgcaaatggccgggcagtgcagccagaacgaatactttgactccttgttgtacgcatgtattccttgccaactgcgctgttcaagcaacacccccccgctcgcgtgtcagcggtactgcaacgcatctgttaccaacagtgtcaaagggactaatgcg

SEQ ID NO: 444 - DNA, 159 bp, ARTIFICIAL SEQUENCE
  BCMA H19Y, I22V ECD
ctgcaaatggccgggcagtgcagccagaacgaatactttgactccttgttgtacgcatgtgttccttgccaactgcgctgttcaagcaacacccccccgctcacgtgtcagcggtactgcaacgcatctgttaccaacagtgtcaaagggactaatgcg

SEQ ID NO: 445 - DNA, 159 bp, ARTIFICIAL SEQUENCE
  BCMA N11D, H19Y ECD
ctgcaaatggccgggcagtgcagccaggacgaatactttgactccttgttgtacgcatgtattccttgccaactgcgctgttcaagcaacacccccccgctcacgtgtcagcggtactgcaacgcatctgttaccaacagtgtcaaagggactaatgcg

SEQ ID NO: 446 - DNA, 159 bp, ARTIFICIAL SEQUENCE
  BCMA H19Y, T36M ECD
ctgcaaatggccgggcagtgcagccagaacgaatactttgactccttgttgtacgcatgtattccatgccaactgcgctgttcaagcaacacccccccgctcatgtgtcagcggtactgcaacgcatctgttaccaacagtgtcaaagggactaatgcg

SEQ ID NO: 447 - DNA, 159 bp, ARTIFICIAL SEQUENCE
  BCMA N11S, H19Y ECD
ctgcaaatggccgggcagtgcagccagagcgaatactttgactccttgttgtacgcatgtattccttgccaactgcgctgttcaagcaacacccccccgctcacgtgtcagcggtactgcaacgcatctgttaccaacagtgtcaaagggactaatgcg

SEQ ID NO: 448 - DNA, 159 bp, ARTIFICIAL SEQUENCE
  BCMA H19Y, L35P, T46A ECD
ctgcaaatggccgggcagtgcagtcagaacgaatactttgactccttgttgtacgcatgtattccatgccaactacgctgttcaagcaacacccccccgcccacgtgtcagcggtactgcaacgcatctgttgccaacagtgtcaaagggactaatgcg

SEQ ID NO: 449 - DNA, 159 bp, ARTIFICIAL SEQUENCE
  BCMA H19Y, N47D ECD
ctgcaaatggccgggcagtgcagccagaacgaatactttgactccttgttgtacgcatgtattccttgccaactgcgctgttcaagcaacacccccccgctcacgtgtcagcggtactgcaacgcatctgttaccgacagtgtcaaagggactaatgcg

SEQ ID NO: 450 - DNA, 159 bp, ARTIFICIAL SEQUENCE
  BCMA S9D, H19Y ECD
ctgcaaatggccgggcagtgcgaccagaacgaatactttgactccttgttgtacgcatgtattccttgccaactgcgctgttcaagcaacacccccccgctcacgtgtcagcggtactgcaacgcatctgttaccaacagtgtcaaagggactaatgcg

SEQ ID NO: 451 - DNA, 159 bp, ARTIFICIAL SEQUENCE
  BCMA H19Y, S30G, V45D ECD
ctgcaaatggccgggcagtgcagccagaacgaatactttgactccttgttgtacgcgtgtattccttgccaactgcgctgttcaggcaacacccccccgctcacgtgtcagcggtactgcaacgcatctgataccaacagtgtcaaagggactaatgcg

SEQ ID NO: 452 - DNA, 159 bp, ARTIFICIAL SEQUENCE
  BCMA H19Y, R39Q ECD
ctgcaaatggccgggcagtgcagtcagaacgaatactttgactccttgttgtacgcatgtattccttgccaactgcgctgttcaagcaacacccccccgctcacgtgtcagcagtactgcaacgcatctgttaccaatagtgtcaaagggactaatgcg

SEQ ID NO: 453 - DNA, 159 bp, ARTIFICIAL SEQUENCE
  BCMA H19Y, L35P ECD
ctgcaaatggccgggcagtgcagccagaacgaatactttgactccttgttgtacgcatgtattccatgccaactacgctgttcaagcaacacccccccgcccacgtgtcagcggtactgcaacgcatctgttaccaatagtgtcaaagggactaatgcg

SEQ ID NO: 454 - DNA, 159 bp, ARTIFICIAL SEQUENCE
  BCMA S9D, H19Y, R27H ECD
ctgcaaatggccgggcagtgcgaccagaacgaatactttgactccttgttgtacgcatgtattccttgccaactgcactgttcaagcaacacccccccgctcacgtgtcagcggtactgcaacgcatctgttaccaacagtgtcaaagggactaatgcg

SEQ ID NO: 455 - DNA, 159 bp, ARTIFICIAL SEQUENCE
  BCMA Q10P, H19Y, Q25H ECD
ctgcaaatggccgggcagtgcagccctaacgaatactttgactccttgttgtacgcatgtattccttgccatctgcgctgttcaagcaacacacccccgctcacgtgtcagcggtactgcaacgcatctgttaccaacagtgtcaaagggactaatgcg

SEQ ID NO: 456 - DNA, 159 bp, ARTIFICIAL SEQUENCE
  BCMA H19Y, R39L, N47D ECD
ctgcaaatggccgggcagtgcagtcagaacgaatactttgactccttgttgtacgcatgtataccttgccaactgcgctgttctagtaacacaccaccgctcacgtgtcagctgtactgcaacgcatctgttaccgacagtgtcaaagggactaatgcg

SEQ ID NO: 457 - DNA, 159 bp, ARTIFICIAL SEQUENCE
  BCMA N11D, H19Y, N47D ECD
ctgcaaatggccgggcagtgcagccaggacgaatactttgactcattgttgtacgcatgtattccttgccaactgcgctgttcaagcaacacccccccgctcacgtgtcagcggtactgcaacgcatctgttaccgacagtgtcaaagggactaatgcg

SEQ ID NO: 458 - DNA, 159 bp, ARTIFICIAL SEQUENCE
  BCMA H19Y, T32S ECD
ctgcaaatggccgggcagtgcagccagaacgaatactttgactccttgttgtacgcatgtattccttgccaactgcgctgttcaagcaactcacccccgctcacgtgtcagcggtactgcaacgcatctgttaccaacagtgtcaaagggactaatgcg

SEQ ID NO: 459 - DNA, 159 bp, ARTIFICIAL SEQUENCE
  BCMA N11S, H19Y, S29P ECD
ctgcaaatggccgggcagtgcagccagagcgaatactttgactccttgttgtacgcatgtattccgtgccaactgcgctgtccaagcaacacccccccgctcacgtgtcagcggtactgcaacgcatctgttaccaacagtgtcaaagggactaatgcg

SEQ ID NO: 460 - DNA, 159 bp, ARTIFICIAL SEQUENCE
  BCMA H19Y, R39Q, N47D ECD
ctgcaaatggccgggcagtgcagccagaacgaatactttgactccttgttgtacgcatgtattccctgccaactgcgctgttcaagcaacacccccccgctcacgtgtcagcagtactgcaacgcatctgttaccgacagtgtcaaagggactaatgcg

SEQ ID NO: 461 - DNA, 159 bp, ARTIFICIAL SEQUENCE
  BCMA S16A, H19Y, R39Q ECD
ctgcaaatggccgggcagtgcagccagaacgaatactttgacgccttgttgtacgcatgtattccttgccaactgcgctgttcaagcaacacccccccgctcacgtgtcagcagtactgcaacgcatctgttaccaatagtgtcaaagggactaatgcg

SEQ ID NO: 462 - DNA, 159 bp, ARTIFICIAL SEQUENCE
  BCMA S9N, H19Y, N31K, T46I ECD
ctgcaaatggccgggcagtgcaaccagaacgaatactttgactccttgttgtacgcatgtattccttgccaactgcgctgttcaagcaagactcccccgctcacgtgtcagcggtactgcaacgcatcagttatcaacagtgtcaaagggactaatgcg

SEQ ID NO: 463 - DNA, 159 bp, ARTIFICIAL SEQUENCE
  BCMA H19Y, R27L, N31Y, T32S, T36A ECD
ctgcaaatggccgggcagtgcagccagaacgaatactttgactccttgttgtacgcatgtattccttgccaactgctatgttcaagctacagccccccgctcgcgtgtcagcggtactgcaacgcatctgttaccaacagtgtcaaagggactaatgcg

SEQ ID NO: 464 - DNA, 159 bp, ARTIFICIAL SEQUENCE
  BCMA N11S, H19Y, T46A ECD
ctgcaaatggccgggcagtgcagccagagcgaatactttgactccttgttgtacgcatgtattccttgccaactgcgatgttcgagcaacacccccccgctcacgtgtcagcggtactgcaacgcatctgttgctaacagtgtcaaagggactaatgcg

SEQ ID NO: 465 - DNA, 159 bp, ARTIFICIAL SEQUENCE
  BCMA H19Y, T32I ECD
ctgcaaatggccgggcagtgcagccagaacgaatactttgactccttgttgtacgcatgtattccttgccaactgcgctgttcaagcaacatccccccgctcacgtgtcagcggtactgcaacgcatctgttaccaacagtgtcaaagggactaatgcg

SEQ ID NO: 466 - DNA, 159 bp, ARTIFICIAL SEQUENCE
  BCMA S9G, H19Y, T36S, A43S ECD
ctgcaaatggccgggcagtgcggccagaacgaatactttgactccttgttgtacgcatgtattccttgccaactgcgctgttcaagcaacacccccccgctctcgtgtcagcggtactgcaactcatctgttaccaacagtgtcaaagggactaatgcg

SEQ ID NO: 467 - DNA, 159 bp, ARTIFICIAL SEQUENCE
  BCMA H19Y, S48G ECD
ctgcaaatggccgggcagtgcagccagaacgaatactttgactccttgttgtacgcatgtattccttgccaactgcgctgttcaagcaacacccccccgctcacgtgtcagcggtactgcaacgcatctgttaccaacggtgtcaaagggactaatgcg

SEQ ID NO: 468 - DNA, 159 bp, ARTIFICIAL SEQUENCE
  BCMA S9N, H19Y, I22V, N31D ECD
ctgcaaatggccgggcagtgcaaccagaacgaatactttgactccttgttgtacgcatgtgttccttgccaactgcgctgttcaagcgacacccccccgctcacgtgtcagcggtactgcaacgcatctgttaccaacagtgtcaaagggactaatgcg

SEQ ID NO: 469 - DNA, 159 bp, ARTIFICIAL SEQUENCE
  BCMA S9N, H19Y, Q25K, N31D ECD
ctgcaaatggccgggcagtgcaaccagaacgaatactttgactccttgttgtacgcatgtattccttgcaaactgcgctgttcaagcgacacccccccgctcacgtgtcagcggtactgcaacgcatctgttaccaacagtgtcaaagggactaatgcg

SEQ ID NO: 470 - DNA, 159 bp, ARTIFICIAL SEQUENCE
  BCMA S9G, H19Y, T32S ECD
ctgcaaatggccgggcagtgcggccagaacgaatactttgactccttgttgtacgcatgtattccttgccaactgcgctgttcaagcaactcccctccgctcacgtgtcagcggtactgcaatgcatctgttaccaacagtgtcaaagggactaatgcg

SEQ ID NO: 471 - DNA, 159 bp, ARTIFICIAL SEQUENCE
  BCMA H19Y, T36A, N47Y ECD
ctgcaaatggccgggcagtgcagccagaacgaatactttgactccttgttgtacgcatgtattccttgccagctgcgctgttcaagcaacacccccccgctcgcgtgtcagcggtactgcaatgcatctgttacctacagtgtcaaagggactaatgcg

SEQ ID NO: 472 - DNA, 159 bp, ARTIFICIAL SEQUENCE
  BCMA H19Y, V45A, T46I ECD
ctgcaaatggccgggcagtgcagccagaacgaatactttgactccttgttatacgcatgtattccttgccaactgcgctgttcaagcaacacccccccgctcacgtgtcagcggtactgcaacgcatctgctatcaacagtgtcaaagggactaatgcg

SEQ ID NO: 473 - DNA, 159 bp, ARTIFICIAL SEQUENCE
  BCMA H19Y, Q25K, N31D ECD
ctgcaaatggccgggcagtgcagccagaacgaatactttgactccttgttgtacgcatgtattccttgcaaactgcgctgttcaagcgacacccccccgctcacgtgtcagcggtactgcaacgcatctgttaccaacagtgtcaaagggactaatgcg

SEQ ID NO: 474 - DNA, 159 bp, ARTIFICIAL SEQUENCE
  BCMA H19Y, Q25H, R39Q, V45D ECD
ctgcaaatggccgggcagtgtagccagaacgaatactttgactccttgttgtacgcgtgtattccctgccatctgcgctgttcgagcaacacccccccactcacatgtcagcagtactgcaacgcatctgataccaacagtgtcaaagggactaatgcg

SEQ ID NO: 475 - DNA, 159 bp, ARTIFICIAL SEQUENCE
  BCMA H19Y, T32S, N47D ECD
ctgcaaatggccgggcagtgcagccagaacgaatactttgactccttgttgtacgcatgtattccttgccaactgcgctgttcaagcaactcacccccgctcacgtgtcagcggtactgcaacgcatctgttaccgacagtgtcaaagggactaatgcg

SEQ ID NO: 476 - DNA, 159 bp, ARTIFICIAL SEQUENCE
  BCMA Q10E, H19Y, A20T, T36S ECD
ctgcaaatggccgggcagtgcagcgagaacgaatactttgactccttgttgtacacatgtattccttgccaactgcgctgttcaagcaacacccccccgctctcgtgtcagcggtactgcaacgcatctgttaccaacagtgtcaaagggactaatgcg

SEQ ID NO: 477 - DNA, 159 bp, ARTIFICIAL SEQUENCE
  BCMA H19Y, T32S, V45I ECD
ctgcaaatggccgggcagtgtagccagaacgaatactttgactccttgttgtacgcatgtattccttgccaactgcgctgttcaagcaactcccccccgctcacgtgtcagcggtactgcaacgcatccattaccaacagtgtcaaagggactaatgcg

SEQ ID NO: 478 - DNA, 159 bp, ARTIFICIAL SEQUENCE
  BCMA H19A ECD
ctgcaaatggccgggcagtgcagccagaacgaatactttgactccttgttggcagcatgtattccttgccaactgcgctgttcaagcaacacccccccgctcacgtgtcagcggtactgcaacgcatctgttaccaacagtgtcaaagggactaatgcg

SEQ ID NO: 479 - DNA, 159 bp, ARTIFICIAL SEQUENCE
  BCMA H19C ECD
ctgcaaatggccgggcagtgcagccagaacgaatactttgactccttgttgtgtgcatgtattccttgccaactgcgctgttcaagcaacacccccccgctcacgtgtcagcggtactgcaacgcatctgttaccaacagtgtcaaagggactaatgcg

SEQ ID NO: 480 - DNA, 159 bp, ARTIFICIAL SEQUENCE
  BCMA H19D ECD
ctgcaaatggccgggcagtgcagccagaacgaatactttgactccttgttggacgcatgtattccttgccaactgcgctgttcaagcaacacccccccgctcacgtgtcagcggtactgcaacgcatctgttaccaacagtgtcaaagggactaatgcg

SEQ ID NO: 481 - DNA, 159 bp, ARTIFICIAL SEQUENCE
  BCMA H19E ECD
ctgcaaatggccgggcagtgcagccagaacgaatactttgactccttgttggaggcatgtattccttgccaactgcgctgttcaagcaacacccccccgctcacgtgtcagcggtactgcaacgcatctgttaccaacagtgtcaaagggactaatgcg

SEQ ID NO: 482 - DNA, 159 bp, ARTIFICIAL SEQUENCE
  BCMA H19F ECD
ctgcaaatggccgggcagtgcagccagaacgaatactttgactccttgttgttcgcatgtattccttgccaactgcgctgttcaagcaacacccccccgctcacgtgtcagcggtactgcaacgcatctgttaccaacagtgtcaaagggactaatgcg

SEQ ID NO: 483 - DNA, 159 bp, ARTIFICIAL SEQUENCE
  BCMA H19G ECD
ctgcaaatggccgggcagtgcagccagaacgaatactttgactccttgttgggcgcatgtattccttgccaactgcgctgttcaagcaacacccccccgctcacgtgtcagcggtactgcaacgcatctgttaccaacagtgtcaaagggactaatgcg

SEQ ID NO: 484 - DNA, 159 bp, ARTIFICIAL SEQUENCE
  BCMA H19I ECD
ctgcaaatggccgggcagtgcagccagaacgaatactttgactccttgttgatcgcatgtattccttgccaactgcgctgttcaagcaacacccccccgctcacgtgtcagcggtactgcaacgcatctgttaccaacagtgtcaaagggactaatgcg

SEQ ID NO: 485 - DNA, 159 bp, ARTIFICIAL SEQUENCE
  BCMA H19K ECD
ctgcaaatggccgggcagtgcagccagaacgaatactttgactccttgttgaaggcatgtattccttgccaactgcgctgttcaagcaacacccccccgctcacgtgtcagcggtactgcaacgcatctgttaccaacagtgtcaaagggactaatgcg

SEQ ID NO: 486 - DNA, 159 bp, ARTIFICIAL SEQUENCE
  BCMA  H19L ECD
ctgcaaatggccgggcagtgcagccagaacgaatactttgactccttgttgctcgcatgtattccttgccaactgcgctgttcaagcaacacccccccgctcacgtgtcagcggtactgcaacgcatctgttaccaacagtgtcaaagggactaatgcg

SEQ ID NO: 487 - DNA, 159 bp, ARTIFICIAL SEQUENCE
  BCMA H19M ECD
ctgcaaatggccgggcagtgcagccagaacgaatactttgactccttgttgatggcatgtattccttgccaactgcgctgttcaagcaacacccccccgctcacgtgtcagcggtactgcaacgcatctgttaccaacagtgtcaaagggactaatgcg

SEQ ID NO: 488 - DNA, 159 bp, ARTIFICIAL SEQUENCE
  BCMA H19N ECD
ctgcaaatggccgggcagtgcagccagaacgaatactttgactccttgttgaatgcatgtattccttgccaactgcgctgttcaagcaacacccccccgctcacgtgtcagcggtactgcaacgcatctgttaccaacagtgtcaaagggactaatgcg

SEQ ID NO: 489 - DNA, 159 bp, ARTIFICIAL SEQUENCE
  BCMA H19P ECD
ctgcaaatggccgggcagtgcagccagaacgaatactttgactccttgttgcctgcatgtattccttgccaactgcgctgttcaagcaacacccccccgctcacgtgtcagcggtactgcaacgcatctgttaccaacagtgtcaaagggactaatgcg

SEQ ID NO: 490 - DNA, 159 bp, ARTIFICIAL SEQUENCE
  BCMA H19Q ECD
ctgcaaatggccgggcagtgcagccagaacgaatactttgactccttgttgcaggcatgtattccttgccaactgcgctgttcaagcaacacccccccgctcacgtgtcagcggtactgcaacgcatctgttaccaacagtgtcaaagggactaatgcg

SEQ ID NO: 491 - DNA, 159 bp, ARTIFICIAL SEQUENCE
  BCMA H19R ECD
ctgcaaatggccgggcagtgcagccagaacgaatactttgactccttgttgcgagcatgtattccttgccaactgcgctgttcaagcaacacccccccgctcacgtgtcagcggtactgcaacgcatctgttaccaacagtgtcaaagggactaatgcg

SEQ ID NO: 492 - DNA, 159 bp, ARTIFICIAL SEQUENCE
  BCMA H19S ECD
ctgcaaatggccgggcagtgcagccagaacgaatactttgactccttgttgtccgcatgtattccttgccaactgcgctgttcaagcaacacccccccgctcacgtgtcagcggtactgcaacgcatctgttaccaacagtgtcaaagggactaatgcg

SEQ ID NO: 493 - DNA, 159 bp, ARTIFICIAL SEQUENCE
  BCMA H19T ECD
ctgcaaatggccgggcagtgcagccagaacgaatactttgactccttgttgacagcatgtattccttgccaactgcgctgttcaagcaacacccccccgctcacgtgtcagcggtactgcaacgcatctgttaccaacagtgtcaaagggactaatgcg

SEQ ID NO: 494 - DNA, 159 bp, ARTIFICIAL SEQUENCE
  BCMA H19V ECD
ctgcaaatggccgggcagtgcagccagaacgaatactttgactccttgttggtagcatgtattccttgccaactgcgctgttcaagcaacacccccccgctcacgtgtcagcggtactgcaacgcatctgttaccaacagtgtcaaagggactaatgcg

SEQ ID NO: 495 - DNA, 159 bp, ARTIFICIAL SEQUENCE
  BCMA H19W ECD
ctgcaaatggccgggcagtgcagccagaacgaatactttgactccttgttgtgggcatgtattccttgccaactgcgctgttcaagcaacacccccccgctcacgtgtcagcggtactgcaacgcatctgttaccaacagtgtcaaagggactaatgcg

SEQ ID NO: 496 - DNA, 159 bp, ARTIFICIAL SEQUENCE
  BCMA H19F, Q25E, N31L, L35Y, T36S ECD
ctgcaaatggccgggcagtgcagccagaacgaatactttgactccttgttgtttgcatgtattccttgcgagctgcgctgttcaagcttgacccccccgtatagttgtcagcggtactgcaacgcatctgttaccaacagtgtcaaagggactaatgcg

SEQ ID NO: 497 - DNA, 159 bp, ARTIFICIAL SEQUENCE
  BCMA H19F, Q25F, N31S, T36S ECD
ctgcaaatggccgggcagtgcagccagaacgaatactttgactccttgttgtttgcatgtattccttgctttctgcgctgttcaagctctacccccccgctgtcttgtcagcggtactgcaacgcatctgttaccaacagtgtcaaagggactaatgcg

SEQ ID NO: 498 - DNA, 159 bp, ARTIFICIAL SEQUENCE
  BCMA H19I, Q25F, N31S, T36V ECD
ctgcaaatggccgggcagtgcagccagaacgaatactttgactccttgttgattgcatgtattccttgctttctgcgctgttcaagctcgacccccccgcttgtttgtcagcggtactgcaacgcatctgttaccaacagtgtcaaagggactaatgcg

SEQ ID NO: 499 - DNA, 159 bp, ARTIFICIAL SEQUENCE
  BCMA H19F, Q25V, N31M, T36S ECD
ctgcaaatggccgggcagtgcagccagaacgaatactttgactccttgttgtttgcatgtattccttgcgtgctgcgctgttcaagcatgacccccccgctgtcttgtcagcggtactgcaacgcatctgttaccaacagtgtcaaagggactaatgcg

SEQ ID NO: 500 - DNA, 159 bp, ARTIFICIAL SEQUENCE
  BCMA H19Y, Q25Y, N31L, L35Y, T36S ECD
ctgcaaatggccgggcagtgcagccagaacgaatactttgactccttgttgtatgcatgtattccttgctatctgcgctgttcaagcttgacccccccgtatagttgtcagcggtactgcaacgcatctgttaccaacagtgtcaaagggactaatgcg

SEQ ID NO: 501 - DNA, 159 bp, ARTIFICIAL SEQUENCE
  BCMA H19F, Q25I, N31M, L35A, T36S ECD
ctgcaaatggccgggcagtgcagccagaacgaatactttgactccttgttgtttgcatgtattccttgcattctgcgctgttcaagcatgacccccccggcgtcgtgtcagcggtactgcaacgcatctgttaccaacagtgtcaaagggactaatgcg

SEQ ID NO: 502 - DNA, 159 bp, ARTIFICIAL SEQUENCE
  BCMA H19I, Q25L, N31L, L35Y, T36S ECD
ctgcaaatggccgggcagtgcagccagaacgaatactttgactccttgttgattgcatgtattccttgcttgctgcgctgttcaagcttgacccccccgtatagttgtcagcggtactgcaacgcatctgttaccaacagtgtcaaagggactaatgcg

SEQ ID NO: 503 - DNA, 159 bp, ARTIFICIAL SEQUENCE
  BCMA H19F, Q25L, N31G, L35P, T36A ECD
ctgcaaatggccgggcagtgcagccagaacgaatactttgactccttgttgtttgcatgtattccttgcttgctgcgctgttcaagcggtacccccccgccggcgtgtcagcggtactgcaacgcatctgttaccaacagtgtcaaagggactaatgcg

SEQ ID NO: 504 - DNA, 159 bp, ARTIFICIAL SEQUENCE
  BCMA H19Y, I22L, N31G ECD
ctgcaaatggccgggcagtgcagccagaacgaatactttgactccttgttgtatgcatgtctgccttgccaactgcgctgttcaagtggtacccccccgttgacgtgtcagcggtactgcaacgcatctgttaccaacagtgtcaaagggactaatgcg

SEQ ID NO: 505 - DNA, 159 bp, ARTIFICIAL SEQUENCE
  BCMA H19F, I22V, Q25M, N31P, T36M ECD
ctgcaaatggccgggcagtgcagccagaacgaatactttgactccttgttgtttgcatgtgttccttgcatgctgcgctgttcaagccctacccccccgttgatgtgtcagcggtactgcaacgcatctgttaccaacagtgtcaaagggactaatgcg

SEQ ID NO: 506 - DNA, 159 bp, ARTIFICIAL SEQUENCE
  BCMA H19Y, N31L, L35Y, T36S ECD
ctgcaaatggccgggcagtgcagccagaacgaatactttgactccttgttgtatgcatgtattccttgccagctgcgctgttcaagcttgacccccccgtatagttgtcagcggtactgcaacgcatctgttaccaacagtgtcaaagggactaatgcg

SEQ ID NO: 507 - DNA, 159 bp, ARTIFICIAL SEQUENCE
  BCMA H19L, S30G, N31H, L35A ECD
ctgcaaatggccgggcagtgcagccagaacgaatactttgactccttgttgttggcatgtattccttgccaactgcgctgttcaggtcatacccccccggctacgtgtcagcggtactgcaacgcatctgttaccaacagtgtcaaagggactaatgcg

SEQ ID NO: 508 - DNA, 159 bp, ARTIFICIAL SEQUENCE
  BCMA H19L, Q25S, N31V, L35S, T36V ECD
ctgcaaatggccgggcagtgcagccagaacgaatactttgactccttgttgttggcatgtattccttgcagtctgcgctgttcaagcgttacccccccgagtgtgtgtcagcggtactgcaacgcatctgttaccaacagtgtcaaagggactaatgcg

SEQ ID NO: 509 - DNA, 159 bp, ARTIFICIAL SEQUENCE
  BCMA H19L, Q25S, S30Y, N31G, L35M, T36V ECD
ctgcaaatggccgggcagtgcagccagaacgaatactttgactccttgttgttggcatgtattccttgcagtctgcgctgttcatatgggacccccccgatggtgtgtcagcggtactgcaacgcatctgttaccaacagtgtcaaagggactaatgcg

SEQ ID NO: 510 - DNA, 159 bp, ARTIFICIAL SEQUENCE
  BCMA H19F, Q25F, N31L, L35Y, T36S ECD
ctgcaaatggccgggcagtgcagccagaacgaatactttgactccttgttgtttgcatgtattccttgctttctgcgctgttcaagcttgacccccccgtatagttgtcagcggtactgcaacgcatctgttaccaacagtgtcaaagggactaatgcg

SEQ ID NO: 511 - DNA, 159 bp, ARTIFICIAL SEQUENCE
  BCMA H19F, Q25F, N31S, T36G ECD
ctgcaaatggccgggcagtgcagccagaacgaatactttgactccttgttgtttgcatgtattccttgctttctgcgctgttcaagctctacccccccgctgggttgtcagcggtactgcaacgcatctgttaccaacagtgtcaaagggactaatgcg

SEQ ID NO: 512 - DNA, 159 bp, ARTIFICIAL SEQUENCE
  BCMA H19F, I22V, Q25S, N31V, L35S, T36V ECD
ctgcaaatggccgggcagtgcagccagaacgaatactttgactccttgttgtttgcatgtgttccttgctctctgcgctgttcaagcgttacccccccgagtgtgtgtcagcggtactgcaacgcatctgttaccaacagtgtcaaagggactaatgcg

SEQ ID NO: 513 - DNA, 159 bp, ARTIFICIAL SEQUENCE
  BMCA H19F, Q25G, N31S, L35V, T36N ECD
ctgcaaatggccgggcagtgcagccagaacgaatactttgactccttgttgtttgcatgtattccttgcggtctgcgctgttcaagctcgacccccccggttaattgtcagcggtactgcaacgcatctgttaccaacagtgtcaaagggactaatgcg

SEQ ID NO: 514 - DNA, 159 bp, ARTIFICIAL SEQUENCE
  BCMA H19L, Q25H, N31D, L35S ECD
ctgcaaatggccgggcagtgcagccagaacgaatactttgactccttgttgttggcatgtattccttgccatctgcgctgttcaagcgatacccccccgtctacgtgtcagcagtactgcaacgcatctgttaccaacagtgtcaaagggactaatgcg

SEQ ID NO: 515 - DNA, 159 bp, ARTIFICIAL SEQUENCE
  BCMA H19F, Q25F, N31S, L35Y, T36S ECD
ctgcaaatggccgggcagtgcagccagaacgaatactttgactccttgttgtttgcatgtattccttgctttctgcgctgttcaagctctacccccccgtatagttgtcagcggtactgcaacgcatctgttaccaacagtgtcaaagggactaatgcg

SEQ ID NO: 516 - protein, 82 aa, ARTIFICIAL SEQUENCE
  TACI WT ECD
VAMRSCPEEQYWDPLLGTCMSCKTICNHQSQRTCAAFCRSLSCRKEQGKFYDHLLRDCISCASICGQHPKQCAYFCENKLRS

SEQ ID NO: 517 - protein, 82 aa, ARTIFICIAL SEQUENCE
  TACI L82P ECD
VAMRSCPEEQYWDPLLGTCMSCKTICNHQSQRTCAAFCRSLSCRKEQGKFYDHPLRDCISCASICGQHPKQCAYFCENKLRS

SEQ ID NO: 518 - protein, 82 aa, ARTIFICIAL SEQUENCE
  TACI D85E, K98T ECD
VAMRSCPEEQYWDPLLGTCMSCKTICNHQSQRTCAAFCRSLSCRKEQGKFYDHLLRECISCASICGQHPTQCAYFCENKLRS

SEQ ID NO: 519 - protein, 82 aa, ARTIFICIAL SEQUENCE
  TACI I87L, K98T ECD
VAMRSCPEEQYWDPLLGTCMSCKTICNHQSQRTCAAFCRSLSCRKEQGKFYDHLLRDCLSCASICGQHPTQCAYFCENKLRS

SEQ ID NO: 520 - protein, 82 aa, ARTIFICIAL SEQUENCE
  TACI R60G, Q75E, L82P ECD
VAMRSCPEEQYWDPLLGTCMSCKTICNHQSQGTCAAFCRSLSCRKEEGKFYDHPLRDCISCASICGQHPKQCAYFCENKLRS

SEQ ID NO: 521 - protein, 82 aa, ARTIFICIAL SEQUENCE
  TACI R60G, C86Y ECD
VAMRSCPEEQYWDPLLGTCMSCKTICNHQSQGTCAAFCRSLSCRKEQGKFYDHLLRDYISCASICGQHPKQCAYFCENKLRS

SEQ ID NO: 522 - protein, 82 aa, ARTIFICIAL SEQUENCE
  TACI A101D ECD
VAMRSCPEEQYWDPLLGTCMSCKTICNHQSQRTCAAFCRSLSCRKEQGKFYDHLLRDCISCASICGQHPKQCDYFCENKLRS

SEQ ID NO: 523 - protein, 82 aa, ARTIFICIAL SEQUENCE
  TACI C86Y ECD
VAMRSCPEEQYWDPLLGTCMSCKTICNHQSQRTCAAFCRSLSCRKEQGKFYDHLLRDYISCASICGQHPKQCAYFCENKLRS

SEQ ID NO: 524 - protein, 82 aa, ARTIFICIAL SEQUENCE
  TACI W40R, L82P, F103Y ECD
VAMRSCPEEQYRDPLLGTCMSCKTICNHQSQRTCAAFCRSLSCRKEQGKFYDHPLRDCISCASICGQHPKQCAYYCENKLRS

SEQ ID NO: 525 - protein, 82 aa, ARTIFICIAL SEQUENCE
  TACI W40R, Q59R, T61P, K98T ECD
VAMRSCPEEQYRDPLLGTCMSCKTICNHQSRRPCAAFCRSLSCRKEQGKFYDHLLRDCISCASICGQHPTQCAYFCENKLRS

SEQ ID NO: 526 - protein, 82 aa, ARTIFICIAL SEQUENCE
  TACI L82P, I87L ECD
VAMRSCPEEQYWDPLLGTCMSCKTICNHQSQRTCAAFCRSLSCRKEQGKFYDHPLRDCLSCASICGQHPKQCAYFCENKLRS

SEQ ID NO: 527 - protein, 82 aa, ARTIFICIAL SEQUENCE
  TACI G76S, P97S ECD
VAMRSCPEEQYWDPLLGTCMSCKTICNHQSQRTCAAFCRSLSCRKEQSKFYDHLLRDCISCASICGQHSKQCAYFCENKLRS

SEQ ID NO: 528 - protein, 43 aa, ARTIFICIAL SEQUENCE
  TACI WT ECD
SLSCRKEQGKFYDHLLRDCISCASICGQHPKQCAYFCENKLRS

SEQ ID NO: 529 - protein, 43 aa, ARTIFICIAL SEQUENCE
  TACI D85V ECD
SLSCRKEQGKFYDHLLRVCISCASICGQHPKQCAYFCENKLRS

SEQ ID NO: 530 - protein, 43 aa, ARTIFICIAL SEQUENCE
  TACI E74V ECD
SLSCRKVQGKFYDHLLRDCISCASICGQHPKQCAYFCENKLRS

SEQ ID NO: 531 - protein, 43 aa, ARTIFICIAL SEQUENCE
  TACI R84L ECD
SLSCRKEQGKFYDHLLLDCISCASICGQHPKQCAYFCENKLRS

SEQ ID NO: 532 - protein, 43 aa, ARTIFICIAL SEQUENCE
  TACI K77E, R84L, F103Y ECD
SLSCRKEQGEFYDHLLLDCISCASICGQHPKQCAYYCENKLRS

SEQ ID NO: 533 - protein, 43 aa, ARTIFICIAL SEQUENCE
  TACI Y79F, Q99E ECD
SLSCRKEQGKFFDHLLRDCISCASICGQHPKECAYFCENKLRS

SEQ ID NO: 534 - protein, 43 aa, ARTIFICIAL SEQUENCE
  TACI Y79F ECD
SLSCRKEQGKFFDHLLRDCISCASICGQHPKQCAYFCENKLRS

SEQ ID NO: 535 - protein, 43 aa, ARTIFICIAL SEQUENCE
  TACI R84G ECD
SLSCRKEQGKFYDHLLGDCISCASICGQHPKQCAYFCENKLRS

SEQ ID NO: 536 - protein, 82 aa, ARTIFICIAL SEQUENCE
  TACI L83S, F103S ECD
VAMRSCPEEQYWDPLLGTCMSCKTICNHQSQRTCAAFCRSLSCRKEQGKFYDHLSRDCISCASICGQHPKQCAYSCENKLRS

SEQ ID NO: 537 - protein, 82 aa, ARTIFICIAL SEQUENCE
  TACI L82H ECD
VAMRSCPEEQYWDPLLGTCMSCKTICNHQSQRTCAAFCRSLSCRKEQGKFYDHHLRDCISCASICGQHPKQCAYFCENKLRS

SEQ ID NO: 538 - protein, 43 aa, ARTIFICIAL SEQUENCE
  TACI A101D ECD
SLSCRKEQGKFYDHLLRDCISCASICGQHPKQCDYFCENKLRS

SEQ ID NO: 539 - protein, 43 aa, ARTIFICIAL SEQUENCE
  TACI K77E, R84Q ECD
SLSCRKEQGEFYDHLLQDCISCASICGQHPKQCAYFCENKLRS

SEQ ID NO: 540 - protein, 43 aa, ARTIFICIAL SEQUENCE
  TACI K77E, A101D ECD
SLSCRKEQGEFYDHLLRDCISCASICGQHPKQCDYFCENKLRS

SEQ ID NO: 541 - protein, 43 aa, ARTIFICIAL SEQUENCE
  TACI K77E, F78Y, Y102D ECD
SLSCRKEQGEYYDHLLRDCISCASICGQHPKQCADFCENKLRS

SEQ ID NO: 542 - protein, 43 aa, ARTIFICIAL SEQUENCE
  TACI Q75E, R84Q ECD
SLSCRKEEGKFYDHLLQDCISCASICGQHPKQCAYFCENKLRS

SEQ ID NO: 543 - protein, 43 aa, ARTIFICIAL SEQUENCE
  TACI Q75R, R84G, I92V ECD
SLSCRKERGKFYDHLLGDCISCASVCGQHPKQCAYFCENKLRS

SEQ ID NO: 544 - protein, 43 aa, ARTIFICIAL SEQUENCE
  TACI K77E, A101D, Y102D ECD
SLSCRKEQGEFYDHLLRDCISCASICGQHPKQCDDFCENKLRS

SEQ ID NO: 545 - protein, 43 aa, ARTIFICIAL SEQUENCE
  TACI R84Q ECD
SLSCRKEQGKFYDHLLQDCISCASICGQHPKQCAYFCENKLRS

SEQ ID NO: 546 - protein, 43 aa, ARTIFICIAL SEQUENCE
  TACI R84Q, S88N, A101D ECD
SLSCRKEQGKFYDHLLQDCINCASICGQHPKQCDYFCENKLRS

SEQ ID NO: 547 - protein, 43 aa, ARTIFICIAL SEQUENCE
  TACI K77E ECD
SLSCRKEQGEFYDHLLRDCISCASICGQHPKQCAYFCENKLRS

SEQ ID NO: 548 - protein, 43 aa, ARTIFICIAL SEQUENCE
  TACI R84Q, F103V ECD
SLSCRKEQGKFYDHLLQDCISCASICGQHPKQCAYVCENKLRS

SEQ ID NO: 549 - protein, 43 aa, ARTIFICIAL SEQUENCE
  TACI K77E, Q95R, A101D ECD
SLSCRKEQGEFYDHLLRDCISCASICGRHPKQCDYFCENKLRS

SEQ ID NO: 550 - protein, 43 aa, ARTIFICIAL SEQUENCE
  TACI I87M, A101D ECD
SLSCRKEQGKFYDHLLRDCMSCASICGQHPKQCDYFCENKLRS

SEQ ID NO: 551 - DNA, 246 bp, ARTIFICIAL SEQUENCE
  TACI WT ECD
gtggcaatgcgctcatgcccagaggaacaatattgggatccgcttcttgggacgtgtatgagctgcaagaccatctgtaatcatcaatcccaaaggacatgcgcagctttctgcaggagtctctcttgcaggaaagagcaaggcaaattttacgaccatcttttgcgagactgtataagctgtgcgtctatttgtggacaacaccctaaacaatgtgcttatttctgtgaaaataagcttcgatct

SEQ ID NO: 552 - DNA, 246 bp, ARTIFICIAL SEQUENCE
  TACI L82P ECD
gtggcaatgcgctcatgcccagaggaacaatattgggatccgcttcttgggacgtgtatgagctgcaagaccatctgtaatcatcaatcccaaaggacatgcgcagctttctgcaggagtctctcttgcaggaaagagcaaggcaaattttacgaccatcctttgcgagactgtataagctgtgcgtctatttgtggacaacaccctaaacaatgtgcttatttctgtgaaaataagcttcgatct

SEQ ID NO: 553 - DNA, 246 bp, ARTIFICIAL SEQUENCE
  TACI D85E, K98T ECD
gtggcaatgcgctcatgcccagaggaacaatattgggatccgcttcttgggacgtgtatgagctgcaagaccatctgtaatcatcaatcccaaaggacatgcgcagctttctgcaggagtctctcttgcaggaaagagcaaggcaaattttacgaccatcttttgcgagaatgtataagctgtgcgtctatttgtggacaacaccctacacaatgtgcttatttctgtgaaaataagcttcgatct

SEQ ID NO: 554 - DNA, 246 bp, ARTIFICIAL SEQUENCE
  TACI I87L, K98T ECD
gtggcaatgcgctcatgcccagaggaacaatattgggatccgcttcttgggacgtgtatgagctgcaagaccatctgtaatcatcaatcccaaaggacatgcgcagctttctgcaggagtctctcttgcaggaaagagcaaggcaaattttacgaccatcttttgcgagactgtttaagctgtgcgtctatttgtggacaacaccctacacaatgtgcttatttctgtgaaaataagcttcgatct

SEQ ID NO: 555 - DNA, 246 bp, ARTIFICIAL SEQUENCE
  TACI R60G, Q75E, L82P ECD
gtggcaatgcgctcatgcccagaggaacaatattgggatccgcttcttgggacgtgtatgagctgcaagaccatctgtaatcatcaatcccaagggacatgcgcagctttctgcaggagtctctcttgcaggaaagaggaaggcaaattttacgaccatcctttgcgagactgtataagctgtgcgtctatttgtggacaacaccctaaacaatgtgcttatttctgtgaaaataagcttcgatct

SEQ ID NO: 556 - DNA, 246 bp, ARTIFICIAL SEQUENCE
  TACI R60G, C86Y ECD
gtggcaatgcgctcatgcccagaggaacaatattgggatccgcttcttgggacgtgtatgagctgcaagaccatctgtaatcatcaatcccaagggacatgcgcagctttctgcaggagtctctcttgcaggaaagagcaaggcaaattttacgaccatcttttgcgagactacataagctgtgcgtctatttgtggacaacaccctaaacaatgtgcttatttctgtgaaaataagcttcgatct

SEQ ID NO: 557 - DNA, 246 bp, ARTIFICIAL SEQUENCE
  TACI A101D ECD
gtggcaatgcgctcatgcccagaggaacaatattgggatccgcttcttgggacgtgtatgagctgcaagaccatctgtaatcatcaatcccaaaggacatgcgcagctttctgcaggagtctctcttgcaggaaagagcaaggcaaattttacgaccatcttttgcgagactgtataagctgtgcgtctatttgtggacaacaccctaaacaatgtgattatttctgtgaaaataagcttcgatct

SEQ ID NO: 558 - DNA, 246 bp, ARTIFICIAL SEQUENCE
  TACI C86Y ECD
gtggcaatgcgctcatgcccagaggaacaatattgggatccgcttcttgggacgtgtatgagctgcaagaccatctgtaatcatcaatcccaaaggacatgcgcagctttctgcaggagtctctcttgcaggaaagagcaaggcaaattttacgaccatcttttgcgagactatataagctgtgcgtctatttgtggacaacaccctaaacaatgtgcttatttctgtgaaaataagcttcgatct

SEQ ID NO: 559 - DNA, 246 bp, ARTIFICIAL SEQUENCE
  TACI W40R, L82P, F103Y ECD
gtggcaatgcgctcatgcccagaggaacaatatcgggatccgcttcttgggacgtgtatgagctgcaagaccatctgtaatcatcaatcccaaaggacatgcgcagctttctgcaggagtctctcttgcaggaaagagcaaggcaaattttacgaccatcctttgcgagactgtataagctgtgcgtctatttgtggtcaacaccctaaacaatgtgcttattactgtgaaaataagcttcgatct

SEQ ID NO: 560 - DNA, 246 bp, ARTIFICIAL SEQUENCE
  TACI W40R, Q59R, T61P, K98T ECD
gtggcaatgcgctcatgcccagaggaacaatatcgggatccgcttcttgggacgtgtatgagctgcaagaccatctgtaatcatcaatcccgaaggccatgcgcagcattctgcaggagtctctcttgcaggaaagagcaaggcaaattttacgaccatcttttgcgagactgtataagctgtgcgtctatttgtggacaacaccctacacaatgtgcttatttctgtgaaaataagcttcgatct

SEQ ID NO: 561 - DNA, 246 bp, ARTIFICIAL SEQUENCE
  TACI L82P, I87L ECD
gtggcaatgcgctcatgcccagaggaacaatattgggatccgcttcttgggacgtgtatgagctgcaagaccatctgtaatcatcaatcccaaaggacatgcgcagctttctgcaggagtctctcttgcaggaaagagcaaggcaaattttacgaccatcctttgcgagactgtttaagctgtgcgtctatttgtggacaacaccctaaacaatgtgcttatttctgtgaaaataagcttcgatct

SEQ ID NO: 562 - DNA, 246 bp, ARTIFICIAL SEQUENCE
  TACI G76S, P97S ECD
gtggcaatgcgctcatgcccagaggaacaatattgggatccgcttcttgggacgtgtatgagctgcaagaccatctgtaatcatcaatcccaaaggacatgcgcagctttctgcaggagtctctcttgcaggaaagagcaaagcaaattttacgaccatcttttgcgagactgtataagctgtgcgtctatttgtggtcaacactctaaacaatgtgcttatttctgtgaaaataagcttcgatct

SEQ ID NO: 563 - DNA, 129 bp, ARTIFICIAL SEQUENCE
  TACI WT ECD
agtctctcttgcaggaaagagcaaggcaaattttacgaccatcttttgcgagactgtataagctgtgcgtctatttgtggacaacaccctaaacaatgtgcttatttctgtgaaaataagcttcgatct

SEQ ID NO: 564 - DNA, 129 bp, ARTIFICIAL SEQUENCE
  TACI D85V ECD
agtctctcttgcaggaaagagcaaggcaaattttacgaccatcttttgcgagtctgtataagctgtgcgtctatttgtggacaacaccctaaacaatgtgcttatttctgtgaaaataagcttcgatct

SEQ ID NO: 565 - DNA, 129 bp, ARTIFICIAL SEQUENCE
  TACI E74V ECD
agtctctcttgcaggaaagtgcaaggcaaattttacgaccatcttttgcgagactgtataagctgtgcgtctatttgtggacaacaccctaaacaatgtgcttatttctgtgaaaataagcttcgatct

SEQ ID NO: 566 - DNA, 129 bp, ARTIFICIAL SEQUENCE
  TACI R84L ECD
agtctctcttgcaggaaagagcaaggcaaattttacgaccatcttttgctagactgtataagctgtgcgtctatttgtggacaacaccctaaacaatgtgcttatttctgtgaaaataagcttcgatct

SEQ ID NO: 567 - DNA, 129 bp, ARTIFICIAL SEQUENCE
  TACI K77E, R84L, F103Y ECD
agtctctcttgcaggaaagagcaaggcgaattttacgaccatcttttgctagactgtataagctgtgcgtctatttgtggacaacaccctaaacaatgtgcttattactgtgaaaataagcttcgatct

SEQ ID NO: 568 - DNA, 129 bp, ARTIFICIAL SEQUENCE
  TACI Y79F, Q99E ECD
agtctctcttgcaggaaagagcaaggcaaatttttcgaccatcttttgcgagactgtataagctgtgcgtctatttgtggacaacaccctaaagaatgtgcttatttctgtgaaaataagcttcgatct

SEQ ID NO: 569 - DNA, 129 bp, ARTIFICIAL SEQUENCE
  TACI Y79F ECD
agtctctcttgcaggaaagagcaaggcaaatttttcgaccatcttttgcgagactgtataagctgtgcgtctatttgtggacaacaccctaaacaatgtgcttatttctgtgaaaataagcttcgatct

SEQ ID NO: 570 - DNA, 129 bp, ARTIFICIAL SEQUENCE
  TACI R84G ECD
agtctctcttgcaggaaagagcaaggcaaattttacgaccatcttttgggagactgtataagctgtgcgtctatttgtggacaacaccctaaacaatgtgcttatttctgtgaaaataagcttcgatct

SEQ ID NO: 571 - DNA, 246 bp, ARTIFICIAL SEQUENCE
  TACI L83S, F103S ECD
gtggcaatgcgctcatgcccagaggaacaatattgggatccgcttcttgggacgtgtatgagctgcaagaccatctgtaatcatcaatcccaaaggacatgcgcagctttctgcaggagtctctcttgcaggaaagagcaaggcaaattttacgaccatctttcgcgagactgtataagctgtgcgtctatttgtggacaacaccctaaacaatgtgcttattcctgtgaaaataagcttcgatct

SEQ ID NO: 572 - DNA, 246 bp, ARTIFICIAL SEQUENCE
  TACI L82H ECD
gtggcaatgcgctcatgcccagaggaacaatattgggatccgcttcttgggacgtgtatgagctgcaagaccatctgtaatcatcaatcccaaaggacatgcgcagctttctgcaggagtctctcttgcaggaaagagcaaggcaaattttacgaccatcatttgcgagactgtataagctgtgcgtctatctgtggacaacaccctaaacaatgtgcttatttctgtgaaaataagcttcgatct

SEQ ID NO: 573 - DNA, 129 bp, ARTIFICIAL SEQUENCE
  TACI A101D ECD
agtctctcttgcaggaaagagcaaggcaaattttacgaccatcttttgcgagactgtataagctgtgcgtctatttgtggacaacaccctaaacaatgtgattatttctgtgaaaataagcttcgatct

SEQ ID NO: 574 - DNA, 129 bp, ARTIFICIAL SEQUENCE
  TACI K77E, R84Q ECD
agtctctcttgcaggaaagagcaaggcgaattttacgaccatcttttgcaagactgtataagctgtgcgtctatttgtggacaacaccctaaacaatgtgcttatttctgtgaaaataagcttcgatct

SEQ ID NO: 575 - DNA, 129 bp, ARTIFICIAL SEQUENCE
  TACI K77E, A101D ECD
agtctctcttgcaggaaagagcaaggcgaattttacgaccatcttttgcgagactgtataagctgtgcgtctatttgtggacaacaccctaaacaatgtgattatttctgtgaaaataagcttcgatct

SEQ ID NO: 576 - DNA, 129 bp, ARTIFICIAL SEQUENCE
  TACI K77E, F78Y, Y102D ECD
agtctctcttgcaggaaagagcaaggcgaatattacgaccatcttttgcgagactgtataagctgtgcgtctatttgtggacaacaccctaaacaatgtgctgatttctgtgaaaataagcttcgatct

SEQ ID NO: 577 - DNA, 129 bp, ARTIFICIAL SEQUENCE
  TACI Q75E, R84Q ECD
agtctctcttgcaggaaagaggaaggcaaattttacgaccatcttttgcaagactgtataagctgtgcgtctatttgtggacaacaccctaaacaatgtgcttatttctgtgaaaataagcttcgatct

SEQ ID NO: 578 - DNA, 129 bp, ARTIFICIAL SEQUENCE
  TACI Q75R, R84G, I92V ECD
agtctctcttgcaggaaagagcgaggcaaattttacgaccatcttttgggagactgtataagctgtgcgtctgtttgtggacaacaccctaaacaatgtgcttatttctgtgaaaataagcttcgatct

SEQ ID NO: 579 - DNA, 129 bp, ARTIFICIAL SEQUENCE
  TACI K77E, A101D, Y102D ECD
agtctctcttgcaggaaagagcaaggcgaattttacgaccatcttttgcgagactgtataagctgtgcgtctatttgtggacaacaccctaaacaatgtgatgatttctgtgaaaataagcttcgatct

SEQ ID NO: 580 - DNA, 129 bp, ARTIFICIAL SEQUENCE
  TACI R84Q ECD
agtctctcttgcaggaaagagcaaggcaaattttatgaccatcttttgcaagactgtataagctgtgcgtctatttgtggacaacaccctaaacaatgtgcttatttctgtgaaaataagcttcgatct

SEQ ID NO: 581 - DNA, 129 bp, ARTIFICIAL SEQUENCE
  TACI R84Q, S88N, A101D ECD
agtctctcttgcaggaaagagcaaggcaaattttacgaccatcttttgcaagactgtataaactgtgcgtctatatgtggacaacaccctaaacaatgtgattatttctgtgaaaataagcttcgatct

SEQ ID NO: 582 - DNA, 129 bp, ARTIFICIAL SEQUENCE
  TACI K77E ECD
agtctctcttgcaggaaagagcaaggcgaattttacgaccatcttttgcgagactgtataagctgtgcgtctatttgtggacaacaccctaaacaatgtgcttatttctgtgaaaataagcttcgatct

SEQ ID NO: 583 - DNA, 129 bp, ARTIFICIAL SEQUENCE
  TACI R84Q, F103V ECD
agtctctcttgcaggaaagagcaaggcaaattttacgaccatcttttgcaagactgtataagctgtgcgtctatttgtggacaacaccctaaacaatgtgcttatgtctgtgaaaataagcttcgatct

SEQ ID NO: 584 - DNA, 129 bp, ARTIFICIAL SEQUENCE
  TACI K77E, Q95R, A101D ECD
agtctctcttgcaggaaagagcaaggcgaattttacgaccatcttttgcgagactgtataagctgtgcgtctatttgtggacgacaccctaaacaatgtgattatttctgtgaaaataagcttcgatct

SEQ ID NO: 585 - DNA, 129 bp, ARTIFICIAL SEQUENCE
  TACI I87M, A101D ECD
agtctctcttgcaggaaagagcaaggcaaattttacgaccatcttttgcgagactgtatgagctgtgcgtcaatttgtggacaacaccctaaacaatgtgattatttctgtgaaaataagcttcgatct

SEQ ID NO: 586 - protein, 232 aa, ARTIFICIAL SEQUENCE
  IgG1 Fc
EPKSCDKTHTCPPCPAPELLGGPSVFLFPPKPKDTLMISRTPEVTCVVVDVSHEDPEVKFNWYVDGVEVHNAKTKPREEQYNSTYRVVSVLTVLHQDWLNGKEYKCKVSNKALPAPIEKTISKAKGQPREPQVYTLPPSREEMTKNQVSLTCLVKGFYPSDIAVEWESNGQPENNYKTTPPVLDSDGSFFLYSKLTVDKSRWQQGNVFSCSVMHEALHNHYTQKSLSLSPGK

SEQ ID NO: 587 - protein, 224 aa, ARTIFICIAL SEQUENCE
  CD86 ECD (24-247)
APLKIQAYFNETADLPCQFANSQNQSLSELVVFWQDQENLVLNEVYLGKEKFDSVHSKYMGRTSFDSDSWTLRLHNLQIKDKGLYQCIIHHKKPTGMIRIHQMNSELSVLANFSQPEIVPISNITENVYINLTCSSIHGYPEPKKMSVLLRTKNSTIEYDGVMQKSQDNVTELYDVSISLSVSFPDVTSNMTIFCILETDKTRLLSSPFSIELEDPQPPPDHIP

SEQ ID NO: 588 - protein, 8 aa, ARTIFICIAL SEQUENCE
  FLAG-tag
DYKDDDDK

SEQ ID NO: 589 - protein, 231 aa, ARTIFICIAL SEQUENCE
  Fc C220S/L234A/L235E/G237A/K447del
EPKSSDKTHTCPPCPAPEAEGAPSVFLFPPKPKDTLMISRTPEVTCVVVDVSHEDPEVKFNWYVDGVEVHNAKTKPREEQYNSTYRVVSVLTVLHQDWLNGKEYKCKVSNKALPAPIEKTISKAKGQPREPQVYTLPPSRDELTKNQVSLTCLVKGFYPSDIAVEWESNGQPENNYKTTPPVLDSDGSFFLYSKLTVDKSRWQQGNVFSCSVMHEALHNHYTQKSLSLSPG

SEQ ID NO: 590 - protein, 7 aa, ARTIFICIAL SEQUENCE
  Linker
GSGGGGS

SEQ ID NO: 591 - protein, 232 aa, ARTIFICIAL SEQUENCE
  Fc C220S/L234A/L235E/G237A/E356D/M358L
EPKSSDKTHTCPPCPAPEAEGAPSVFLFPPKPKDTLMISRTPEVTCVVVDVSHEDPEVKFNWYVDGVEVHNAKTKPREEQYNSTYRVVSVLTVLHQDWLNGKEYKCKVSNKALPAPIEKTISKAKGQPREPQVYTLPPSRDELTKNQVSLTCLVKGFYPSDIAVEWESNGQPENNYKTTPPVLDSDGSFFLYSKLTVDKSRWQQGNVFSCSVMHEALHNHYTQKSLSLSPGK

SEQ ID NO: 592 - protein, 5 aa, ARTIFICIAL SEQUENCE
  Linker
GSGGS

SEQ ID NO: 593 - protein, 5 aa, ARTIFICIAL SEQUENCE
  LINKER
GGGGS

SEQ ID NO: 594 - protein, 10 aa, ARTIFICIAL SEQUENCE
  LINKER
GGGGSGGGGS

SEQ ID NO: 595 - protein, 15 aa, ARTIFICIAL SEQUENCE
  LINKER
GGGGSGGGGSGGGGS

SEQ ID NO: 596 - protein, 7 aa, ARTIFICIAL SEQUENCE
  LINKER
GGGGSSA

SEQ ID NO: 597 - protein, 231 aa, ARTIFICIAL SEQUENCE
  Fc (E356D and M358L)
EPKSSDKTHTCPPCPAPELLGGPSVFLFPPKPKDTLMISRTPEVTCVVVDVSHEDPEVKFNWYVDGVEVHNAKTKPREEQYNSTYRVVSVLTVLHQDWLNGKEYKCKVSNKALPAPIEKTISKAKGQPREPQVYTLPPSRDELTKNQVSLTCLVKGFYPSDIAVEWESNGQPENNYKTTPPVLDSDGSFFLYSKLTVDKSRWQQGNVFSCSVMHEALHNHYTQKSLSLSPG

SEQ ID NO: 598 - protein, 232 aa, ARTIFICIAL SEQUENCE
  Fc (C5S (C220S), R77C, (R292C),  N82G (N297G), V87C (V302C))
EPKSSDKTHTCPPCPAPELLGGPSVFLFPPKPKDTLMISRTPEVTCVVVDVSHEDPEVKFNWYVDGVEVHNAKTKPCEEQYGSTYRCVSVLTVLHQDWLNGKEYKCKVSNKALPAPIEKTISKAKGQPREPQVYTLPPSREEMTKNQVSLTCLVKGFYPSDIAVEWESNGQPENNYKTTPPVLDSDGSFFLYSKLTVDKSRWQQGNVFSCSVMHEALHNHYTQKSLSLSPGK

SEQ ID NO: 599 - protein, 232 aa, ARTIFICIAL SEQUENCE
  Fc with C220S/L234A/L235E/G237A
EPKSSDKTHTCPPCPAPEAEGAPSVFLFPPKPKDTLMISRTPEVTCVVVDVSHEDPEVKFNWYVDGVEVHNAKTKPREEQYNSTYRVVSVLTVLHQDWLNGKEYKCKVSNKALPAPIEKTISKAKGQPREPQVYTLPPSREEMTKNQVSLTCLVKGFYPSDIAVEWESNGQPENNYKTTPPVLDSDGSFFLYSKLTVDKSRWQQGNVFSCSVMHEALHNHYTQKSLSLSPGK

SEQ ID NO: 600 - protein, 20 aa, ARTIFICIAL SEQUENCE
  LINKER
GGGGSGGGGSGGGGSGGGGS

SEQ ID NO: 601 - protein, 437 aa, ARTIFICIAL SEQUENCE
  CTLA4 186 GSG4S  Fc- (G4S)4  BCMA 406
KAMHVAQPAVVLASSRGIASFVCEYASPWKATEVRVTVLRQADSQVTEVCAATYMMGNELTFLDDSICTGTSSGNQVNLTIQGLRAMDTGLYICKVEQMYPPPYLLGIGNGTQIYVIDPEPCPDSDGSGGGGSEPKSSDKTHTCPPCPAPEAEGAPSVFLFPPKPKDTLMISRTPEVTCVVVDVSHEDPEVKFNWYVDGVEVHNAKTKPREEQYNSTYRVVSVLTVLHQDWLNGKEYKCKVSNKALPAPIEKTISKAKGQPREPQVYTLPPSRDELTKNQVSLTCLVKGFYPSDIAVEWESNGQPENNYKTTPPVLDSDGSFFLYSKLTVDKSRWQQGNVFSCSVMHEALHNHYTQKSLSLSPGGGGGSGGGGSGGGGSGGGGSLQMAGQCSQNEYFDSLLLACIPCQLRCSSNTPPLTCQRYCNASVTNSVKGTNA

SEQ ID NO: 602 - protein, 437 aa, ARTIFICIAL SEQUENCE
  CTLA4 WT ECD 1 GSG4S Fc (G4S)4 BCMA 406
KAMHVAQPAVVLASSRGIASFVCEYASPGKATEVRVTVLRQADSQVTEVCAATYMMGNELTFLDDSICTGTSSGNQVNLTIQGLRAMDTGLYICKVELMYPPPYYLGIGNGTQIYVIDPEPCPDSDGSGGGGSEPKSSDKTHTCPPCPAPEAEGAPSVFLFPPKPKDTLMISRTPEVTCVVVDVSHEDPEVKFNWYVDGVEVHNAKTKPREEQYNSTYRVVSVLTVLHQDWLNGKEYKCKVSNKALPAPIEKTISKAKGQPREPQVYTLPPSRDELTKNQVSLTCLVKGFYPSDIAVEWESNGQPENNYKTTPPVLDSDGSFFLYSKLTVDKSRWQQGNVFSCSVMHEALHNHYTQKSLSLSPGGGGGSGGGGSGGGGSGGGGSLQMAGQCSQNEYFDSLLLACIPCQLRCSSNTPPLTCQRYCNASVTNSVKGTNA

SEQ ID NO: 603 - protein, 437 aa, ARTIFICIAL SEQUENCE
  CTLA4 186GSG4S Fc- (G4S)4  BCMA 381
KAMHVAQPAVVLASSRGIASFVCEYASPWKATEVRVTVLRQADSQVTEVCAATYMMGNELTFLDDSICTGTSSGNQVNLTIQGLRAMDTGLYICKVEQMYPPPYLLGIGNGTQIYVIDPEPCPDSDGSGGGGSEPKSSDKTHTCPPCPAPEAEGAPSVFLFPPKPKDTLMISRTPEVTCVVVDVSHEDPEVKFNWYVDGVEVHNAKTKPREEQYNSTYRVVSVLTVLHQDWLNGKEYKCKVSNKALPAPIEKTISKAKGQPREPQVYTLPPSRDELTKNQVSLTCLVKGFYPSDIAVEWESNGQPENNYKTTPPVLDSDGSFFLYSKLTVDKSRWQQGNVFSCSVMHEALHNHYTQKSLSLSPGGGGGSGGGGSGGGGSGGGGSLQMAGQCSQNEYFDALLYACIPCQLRCSSNTPPLTCQQYCNASVTNSVKGTNA

SEQ ID NO: 604 - protein, 437 aa, ARTIFICIAL SEQUENCE
  CTLA4 186GSG4S  Fc- (G4S)4  BCMA 411
KAMHVAQPAVVLASSRGIASFVCEYASPWKATEVRVTVLRQADSQVTEVCAATYMMGNELTFLDDSICTGTSSGNQVNLTIQGLRAMDTGLYICKVEQMYPPPYLLGIGNGTQIYVIDPEPCPDSDGSGGGGSEPKSSDKTHTCPPCPAPEAEGAPSVFLFPPKPKDTLMISRTPEVTCVVVDVSHEDPEVKFNWYVDGVEVHNAKTKPREEQYNSTYRVVSVLTVLHQDWLNGKEYKCKVSNKALPAPIEKTISKAKGQPREPQVYTLPPSRDELTKNQVSLTCLVKGFYPSDIAVEWESNGQPENNYKTTPPVLDSDGSFFLYSKLTVDKSRWQQGNVFSCSVMHEALHNHYTQKSLSLSPGGGGGSGGGGSGGGGSGGGGSLQMAGQCSQNEYFDSLLRACIPCQLRCSSNTPPLTCQRYCNASVTNSVKGTNA

SEQ ID NO: 605 - protein, 437 aa, ARTIFICIAL SEQUENCE
  CTLA4 186GSG4S  Fc- (G4S)4 BCMA 405
KAMHVAQPAVVLASSRGIASFVCEYASPWKATEVRVTVLRQADSQVTEVCAATYMMGNELTFLDDSICTGTSSGNQVNLTIQGLRAMDTGLYICKVEQMYPPPYLLGIGNGTQIYVIDPEPCPDSDGSGGGGSEPKSSDKTHTCPPCPAPEAEGAPSVFLFPPKPKDTLMISRTPEVTCVVVDVSHEDPEVKFNWYVDGVEVHNAKTKPREEQYNSTYRVVSVLTVLHQDWLNGKEYKCKVSNKALPAPIEKTISKAKGQPREPQVYTLPPSRDELTKNQVSLTCLVKGFYPSDIAVEWESNGQPENNYKTTPPVLDSDGSFFLYSKLTVDKSRWQQGNVFSCSVMHEALHNHYTQKSLSLSPGGGGGSGGGGSGGGGSGGGGSLQMAGQCSQNEYFDSLLKACIPCQLRCSSNTPPLTCQRYCNASVTNSVKGTNA

SEQ ID NO: 606 - protein, 437 aa, ARTIFICIAL SEQUENCE
  CTLA4 WT ECD 1 GSG4S Fc (G4S)4 BCMA 381
KAMHVAQPAVVLASSRGIASFVCEYASPGKATEVRVTVLRQADSQVTEVCAATYMMGNELTFLDDSICTGTSSGNQVNLTIQGLRAMDTGLYICKVELMYPPPYYLGIGNGTQIYVIDPEPCPDSDGSGGGGSEPKSSDKTHTCPPCPAPEAEGAPSVFLFPPKPKDTLMISRTPEVTCVVVDVSHEDPEVKFNWYVDGVEVHNAKTKPREEQYNSTYRVVSVLTVLHQDWLNGKEYKCKVSNKALPAPIEKTISKAKGQPREPQVYTLPPSRDELTKNQVSLTCLVKGFYPSDIAVEWESNGQPENNYKTTPPVLDSDGSFFLYSKLTVDKSRWQQGNVFSCSVMHEALHNHYTQKSLSLSPGGGGGSGGGGSGGGGSGGGGSLQMAGQCSQNEYFDALLYACIPCQLRCSSNTPPLTCQQYCNASVTNSVKGTNA

SEQ ID NO: 607 - protein, 437 aa, ARTIFICIAL SEQUENCE
  CTLA4 WT ECD 1 GSG4S Fc (G4S)4 BCMA 411
KAMHVAQPAVVLASSRGIASFVCEYASPGKATEVRVTVLRQADSQVTEVCAATYMMGNELTFLDDSICTGTSSGNQVNLTIQGLRAMDTGLYICKVELMYPPPYYLGIGNGTQIYVIDPEPCPDSDGSGGGGSEPKSSDKTHTCPPCPAPEAEGAPSVFLFPPKPKDTLMISRTPEVTCVVVDVSHEDPEVKFNWYVDGVEVHNAKTKPREEQYNSTYRVVSVLTVLHQDWLNGKEYKCKVSNKALPAPIEKTISKAKGQPREPQVYTLPPSRDELTKNQVSLTCLVKGFYPSDIAVEWESNGQPENNYKTTPPVLDSDGSFFLYSKLTVDKSRWQQGNVFSCSVMHEALHNHYTQKSLSLSPGGGGGSGGGGSGGGGSGGGGSLQMAGQCSQNEYFDSLLRACIPCQLRCSSNTPPLTCQRYCNASVTNSVKGTNA

SEQ ID NO: 608 - protein, 437 aa, ARTIFICIAL SEQUENCE
  CTLA4 WT ECD 1 GSG4S Fc (G4S)4 BCMA 405
KAMHVAQPAVVLASSRGIASFVCEYASPGKATEVRVTVLRQADSQVTEVCAATYMMGNELTFLDDSICTGTSSGNQVNLTIQGLRAMDTGLYICKVELMYPPPYYLGIGNGTQIYVIDPEPCPDSDGSGGGGSEPKSSDKTHTCPPCPAPEAEGAPSVFLFPPKPKDTLMISRTPEVTCVVVDVSHEDPEVKFNWYVDGVEVHNAKTKPREEQYNSTYRVVSVLTVLHQDWLNGKEYKCKVSNKALPAPIEKTISKAKGQPREPQVYTLPPSRDELTKNQVSLTCLVKGFYPSDIAVEWESNGQPENNYKTTPPVLDSDGSFFLYSKLTVDKSRWQQGNVFSCSVMHEALHNHYTQKSLSLSPGGGGGSGGGGSGGGGSGGGGSLQMAGQCSQNEYFDSLLKACIPCQLRCSSNTPPLTCQRYCNASVTNSVKGTNA

SEQ ID NO: 609 - protein, 437 aa, ARTIFICIAL SEQUENCE
  BCMA 381 GSG4S Fc- (G4S)4 CTLA4 186
LQMAGQCSQNEYFDALLYACIPCQLRCSSNTPPLTCQQYCNASVTNSVKGTNAGSGGGGSEPKSSDKTHTCPPCPAPEAEGAPSVFLFPPKPKDTLMISRTPEVTCVVVDVSHEDPEVKFNWYVDGVEVHNAKTKPREEQYNSTYRVVSVLTVLHQDWLNGKEYKCKVSNKALPAPIEKTISKAKGQPREPQVYTLPPSRDELTKNQVSLTCLVKGFYPSDIAVEWESNGQPENNYKTTPPVLDSDGSFFLYSKLTVDKSRWQQGNVFSCSVMHEALHNHYTQKSLSLSPGGGGGSGGGGSGGGGSGGGGSKAMHVAQPAVVLASSRGIASFVCEYASPWKATEVRVTVLRQADSQVTEVCAATYMMGNELTFLDDSICTGTSSGNQVNLTIQGLRAMDTGLYICKVEQMYPPPYLLGIGNGTQIYVIDPEPCPDSD

SEQ ID NO: 610 - protein, 427 aa, ARTIFICIAL SEQUENCE
  CTLA4 186 GSG4S Fc (G4S)4 TACI 541
KAMHVAQPAVVLASSRGIASFVCEYASPWKATEVRVTVLRQADSQVTEVCAATYMMGNELTFLDDSICTGTSSGNQVNLTIQGLRAMDTGLYICKVEQMYPPPYLLGIGNGTQIYVIDPEPCPDSDGSGGGGSEPKSSDKTHTCPPCPAPEAEGAPSVFLFPPKPKDTLMISRTPEVTCVVVDVSHEDPEVKFNWYVDGVEVHNAKTKPREEQYNSTYRVVSVLTVLHQDWLNGKEYKCKVSNKALPAPIEKTISKAKGQPREPQVYTLPPSRDELTKNQVSLTCLVKGFYPSDIAVEWESNGQPENNYKTTPPVLDSDGSFFLYSKLTVDKSRWQQGNVFSCSVMHEALHNHYTQKSLSLSPGGGGGSGGGGSGGGGSGGGGSSLSCRKEQGEYYDHLLRDCISCASICGQHPKQCADFCENKLRS

SEQ ID NO: 611 - protein, 427 aa, ARTIFICIAL SEQUENCE
  CTLA4 WT ECD 1 GSG4S Fc (G4S)4 TACI 541
KAMHVAQPAVVLASSRGIASFVCEYASPGKATEVRVTVLRQADSQVTEVCAATYMMGNELTFLDDSICTGTSSGNQVNLTIQGLRAMDTGLYICKVELMYPPPYYLGIGNGTQIYVIDPEPCPDSDGSGGGGSEPKSSDKTHTCPPCPAPEAEGAPSVFLFPPKPKDTLMISRTPEVTCVVVDVSHEDPEVKFNWYVDGVEVHNAKTKPREEQYNSTYRVVSVLTVLHQDWLNGKEYKCKVSNKALPAPIEKTISKAKGQPREPQVYTLPPSRDELTKNQVSLTCLVKGFYPSDIAVEWESNGQPENNYKTTPPVLDSDGSFFLYSKLTVDKSRWQQGNVFSCSVMHEALHNHYTQKSLSLSPGGGGGSGGGGSGGGGSGGGGSSLSCRKEQGEYYDHLLRDCISCASICGQHPKQCADFCENKLRS

SEQ ID NO: 612 - protein, 427 aa, ARTIFICIAL SEQUENCE
  CTLA4 186 GSG4S Fc (G4S)4 (TACI 542
KAMHVAQPAVVLASSRGIASFVCEYASPWKATEVRVTVLRQADSQVTEVCAATYMMGNELTFLDDSICTGTSSGNQVNLTIQGLRAMDTGLYICKVEQMYPPPYLLGIGNGTQIYVIDPEPCPDSDGSGGGGSEPKSSDKTHTCPPCPAPEAEGAPSVFLFPPKPKDTLMISRTPEVTCVVVDVSHEDPEVKFNWYVDGVEVHNAKTKPREEQYNSTYRVVSVLTVLHQDWLNGKEYKCKVSNKALPAPIEKTISKAKGQPREPQVYTLPPSRDELTKNQVSLTCLVKGFYPSDIAVEWESNGQPENNYKTTPPVLDSDGSFFLYSKLTVDKSRWQQGNVFSCSVMHEALHNHYTQKSLSLSPGGGGGSGGGGSGGGGSGGGGSSLSCRKEEGKFYDHLLQDCISCASICGQHPKQCAYFCENKLRS

SEQ ID NO: 613 - protein, 427 aa, ARTIFICIAL SEQUENCE
  CTLA4 WT ECD 1 GSG4S Fc (G4S)4 (TACI 542
KAMHVAQPAVVLASSRGIASFVCEYASPGKATEVRVTVLRQADSQVTEVCAATYMMGNELTFLDDSICTGTSSGNQVNLTIQGLRAMDTGLYICKVELMYPPPYYLGIGNGTQIYVIDPEPCPDSDGSGGGGSEPKSSDKTHTCPPCPAPEAEGAPSVFLFPPKPKDTLMISRTPEVTCVVVDVSHEDPEVKFNWYVDGVEVHNAKTKPREEQYNSTYRVVSVLTVLHQDWLNGKEYKCKVSNKALPAPIEKTISKAKGQPREPQVYTLPPSRDELTKNQVSLTCLVKGFYPSDIAVEWESNGQPENNYKTTPPVLDSDGSFFLYSKLTVDKSRWQQGNVFSCSVMHEALHNHYTQKSLSLSPGGGGGSGGGGSGGGGSGGGGSSLSCRKEEGKFYDHLLQDCISCASICGQHPKQCAYFCENKLRS

SEQ ID NO: 614 - protein, 427 aa, ARTIFICIAL SEQUENCE
  TACI 542 GSG4S Fc (G4S)4 (CTLA4 186
SLSCRKEEGKFYDHLLQDCISCASICGQHPKQCAYFCENKLRSGSGGGGSEPKSSDKTHTCPPCPAPEAEGAPSVFLFPPKPKDTLMISRTPEVTCVVVDVSHEDPEVKFNWYVDGVEVHNAKTKPREEQYNSTYRVVSVLTVLHQDWLNGKEYKCKVSNKALPAPIEKTISKAKGQPREPQVYTLPPSRDELTKNQVSLTCLVKGFYPSDIAVEWESNGQPENNYKTTPPVLDSDGSFFLYSKLTVDKSRWQQGNVFSCSVMHEALHNHYTQKSLSLSPGGGGGSGGGGSGGGGSGGGGSKAMHVAQPAVVLASSRGIASFVCEYASPWKATEVRVTVLRQADSQVTEVCAATYMMGNELTFLDDSICTGTSSGNQVNLTIQGLRAMDTGLYICKVEQMYPPPYLLGIGNGTQIYVIDPEPCPDSD

SEQ ID NO: 615 - protein, 460 aa, ARTIFICIAL SEQUENCE
  TACI 516 (G4S)2 Fc (G4S)2 CTLA 4 668
VAMRSCPEEQYWDPLLGTCMSCKTICNHQSQRTCAAFCRSLSCRKEQGKFYDHLLRDCISCASICGQHPKQCAYFCENKLRSGGGGSGGGGSEPKSSDKTHTCPPCPAPEAEGAPSVFLFPPKPKDTLMISRTPEVTCVVVDVSHEDPEVKFNWYVDGVEVHNAKTKPREEQYNSTYRVVSVLTVLHQDWLNGKEYKCKVSNKALPAPIEKTISKAKGQPREPQVYTLPPSRDELTKNQVSLTCLVKGFYPSDIAVEWESNGQPENNYKTTPPVLDSDGSFFLYSKLTVDKSRWQQGNVFSCSVMHEALHNHYTQKSLSLSPGGGGGSGGGGSKAMHVAQPAVVLASSRGIASFVCEYASPGKATEVRVTVLRQADSQVTEVCAATYMMGNELTFLDDSICTGTSSGNQVNLTIQGLRAMDTGLYICKVELMYPPPYYLGIGNGTQIYVIDPEPSPDSDQ

SEQ ID NO: 616 - protein, 421 aa, ARTIFICIAL SEQUENCE
  TACI 528  (G4S)2 Fc (G4S)2 CTLA 4 WT ECD 1
SLSCRKEQGKFYDHLLRDCISCASICGQHPKQCAYFCENKLRSGGGGSGGGGSEPKSSDKTHTCPPCPAPEAEGAPSVFLFPPKPKDTLMISRTPEVTCVVVDVSHEDPEVKFNWYVDGVEVHNAKTKPREEQYNSTYRVVSVLTVLHQDWLNGKEYKCKVSNKALPAPIEKTISKAKGQPREPQVYTLPPSRDELTKNQVSLTCLVKGFYPSDIAVEWESNGQPENNYKTTPPVLDSDGSFFLYSKLTVDKSRWQQGNVFSCSVMHEALHNHYTQKSLSLSPGGGGGSGGGGSKAMHVAQPAVVLASSRGIASFVCEYASPGKATEVRVTVLRQADSQVTEVCAATYMMGNELTFLDDSICTGTSSGNQVNLTIQGLRAMDTGLYICKVELMYPPPYYLGIGNGTQIYVIDPEPCPDSDQ

SEQ ID NO: 617 - protein, 421 aa, ARTIFICIAL SEQUENCE
  TACI 528  (G4S)2 Fc (G4S)2 CTLA 4 668
SLSCRKEQGKFYDHLLRDCISCASICGQHPKQCAYFCENKLRSGGGGSGGGGSEPKSSDKTHTCPPCPAPEAEGAPSVFLFPPKPKDTLMISRTPEVTCVVVDVSHEDPEVKFNWYVDGVEVHNAKTKPREEQYNSTYRVVSVLTVLHQDWLNGKEYKCKVSNKALPAPIEKTISKAKGQPREPQVYTLPPSRDELTKNQVSLTCLVKGFYPSDIAVEWESNGQPENNYKTTPPVLDSDGSFFLYSKLTVDKSRWQQGNVFSCSVMHEALHNHYTQKSLSLSPGGGGGSGGGGSKAMHVAQPAVVLASSRGIASFVCEYASPGKATEVRVTVLRQADSQVTEVCAATYMMGNELTFLDDSICTGTSSGNQVNLTIQGLRAMDTGLYICKVELMYPPPYYLGIGNGTQIYVIDPEPSPDSDQ

SEQ ID NO: 618 - protein, 253 aa, ARTIFICIAL SEQUENCE
  TACI 516  (EAAAK)6 CTLA 4 WT ECD 1
VAMRSCPEEQYWDPLLGTCMSCKTICNHQSQRTCAAFCRSLSCRKEQGKFYDHLLRDCISCASICGQHPKQCAYFCENKLRSEAAAKEAAAKEAAAKEAAAKEAAAKEAAAKKAMHVAQPAVVLASSRGIASFVCEYASPGKATEVRVTVLRQADSQVTEVCAATYMMGNELTFLDDSICTGTSSGNQVNLTIQGLRAMDTGLYICKVELMYPPPYYLGIGNGTQIYVIDPEPCPDSDQDYKDDDDKHHHHHH

SEQ ID NO: 619 - protein, 253 aa, ARTIFICIAL SEQUENCE
  TACI 516  (EAAAK)6 CTLA 4 668
VAMRSCPEEQYWDPLLGTCMSCKTICNHQSQRTCAAFCRSLSCRKEQGKFYDHLLRDCISCASICGQHPKQCAYFCENKLRSEAAAKEAAAKEAAAKEAAAKEAAAKEAAAKKAMHVAQPAVVLASSRGIASFVCEYASPGKATEVRVTVLRQADSQVTEVCAATYMMGNELTFLDDSICTGTSSGNQVNLTIQGLRAMDTGLYICKVELMYPPPYYLGIGNGTQIYVIDPEPSPDSDQDYKDDDDKHHHHHH

SEQ ID NO: 620 - protein, 214 aa, ARTIFICIAL SEQUENCE
  TACI 528  (EAAAK)6 CTLA 4 WT ECD 1
SLSCRKEQGKFYDHLLRDCISCASICGQHPKQCAYFCENKLRSEAAAKEAAAKEAAAKEAAAKEAAAKEAAAKKAMHVAQPAVVLASSRGIASFVCEYASPGKATEVRVTVLRQADSQVTEVCAATYMMGNELTFLDDSICTGTSSGNQVNLTIQGLRAMDTGLYICKVELMYPPPYYLGIGNGTQIYVIDPEPCPDSDQDYKDDDDKHHHHHH

SEQ ID NO: 621 - protein, 214 aa, ARTIFICIAL SEQUENCE
  TACI 528  (EAAAK)6 CTLA 4 668
SLSCRKEQGKFYDHLLRDCISCASICGQHPKQCAYFCENKLRSEAAAKEAAAKEAAAKEAAAKEAAAKEAAAKKAMHVAQPAVVLASSRGIASFVCEYASPGKATEVRVTVLRQADSQVTEVCAATYMMGNELTFLDDSICTGTSSGNQVNLTIQGLRAMDTGLYICKVELMYPPPYYLGIGNGTQIYVIDPEPSPDSDQDYKDDDDKHHHHHH

SEQ ID NO: 622 - protein, 238 aa, ARTIFICIAL SEQUENCE
  TACI 516  (G4S)3 CTLA 4 668
VAMRSCPEEQYWDPLLGTCMSCKTICNHQSQRTCAAFCRSLSCRKEQGKFYDHLLRDCISCASICGQHPKQCAYFCENKLRSGGGGSGGGGSGGGGSKAMHVAQPAVVLASSRGIASFVCEYASPGKATEVRVTVLRQADSQVTEVCAATYMMGNELTFLDDSICTGTSSGNQVNLTIQGLRAMDTGLYICKVELMYPPPYYLGIGNGTQIYVIDPEPSPDSDQDYKDDDDKHHHHHH

SEQ ID NO: 623 - protein, 199 aa, ARTIFICIAL SEQUENCE
  TACI 528  (G4S)3 CTLA 4 668
SLSCRKEQGKFYDHLLRDCISCASICGQHPKQCAYFCENKLRSGGGGSGGGGSGGGGSKAMHVAQPAVVLASSRGIASFVCEYASPGKATEVRVTVLRQADSQVTEVCAATYMMGNELTFLDDSICTGTSSGNQVNLTIQGLRAMDTGLYICKVELMYPPPYYLGIGNGTQIYVIDPEPSPDSDQDYKDDDDKHHHHHH

SEQ ID NO: 624 - protein, 460 aa, ARTIFICIAL SEQUENCE
  CTLA4 WT ECD 1 (G4S)2 Fc (G4S)2 TACI 516
KAMHVAQPAVVLASSRGIASFVCEYASPGKATEVRVTVLRQADSQVTEVCAATYMMGNELTFLDDSICTGTSSGNQVNLTIQGLRAMDTGLYICKVELMYPPPYYLGIGNGTQIYVIDPEPCPDSDQGGGGSGGGGSEPKSSDKTHTCPPCPAPEAEGAPSVFLFPPKPKDTLMISRTPEVTCVVVDVSHEDPEVKFNWYVDGVEVHNAKTKPREEQYNSTYRVVSVLTVLHQDWLNGKEYKCKVSNKALPAPIEKTISKAKGQPREPQVYTLPPSRDELTKNQVSLTCLVKGFYPSDIAVEWESNGQPENNYKTTPPVLDSDGSFFLYSKLTVDKSRWQQGNVFSCSVMHEALHNHYTQKSLSLSPGGGGGSGGGGSVAMRSCPEEQYWDPLLGTCMSCKTICNHQSQRTCAAFCRSLSCRKEQGKFYDHLLRDCISCASICGQHPKQCAYFCENKLRS

SEQ ID NO: 625 - protein, 460 aa, ARTIFICIAL SEQUENCE
  CTLA 4 668 (G4S)2 Fc (G4S)2 TACI 516
KAMHVAQPAVVLASSRGIASFVCEYASPGKATEVRVTVLRQADSQVTEVCAATYMMGNELTFLDDSICTGTSSGNQVNLTIQGLRAMDTGLYICKVELMYPPPYYLGIGNGTQIYVIDPEPSPDSDQGGGGSGGGGSEPKSSDKTHTCPPCPAPEAEGAPSVFLFPPKPKDTLMISRTPEVTCVVVDVSHEDPEVKFNWYVDGVEVHNAKTKPREEQYNSTYRVVSVLTVLHQDWLNGKEYKCKVSNKALPAPIEKTISKAKGQPREPQVYTLPPSRDELTKNQVSLTCLVKGFYPSDIAVEWESNGQPENNYKTTPPVLDSDGSFFLYSKLTVDKSRWQQGNVFSCSVMHEALHNHYTQKSLSLSPGGGGGSGGGGSVAMRSCPEEQYWDPLLGTCMSCKTICNHQSQRTCAAFCRSLSCRKEQGKFYDHLLRDCISCASICGQHPKQCAYFCENKLRS

SEQ ID NO: 626 - protein, 421 aa, ARTIFICIAL SEQUENCE
  CTLA4 WT ECD 1 (G4S)2 Fc (G4S)2 TACI 528
KAMHVAQPAVVLASSRGIASFVCEYASPGKATEVRVTVLRQADSQVTEVCAATYMMGNELTFLDDSICTGTSSGNQVNLTIQGLRAMDTGLYICKVELMYPPPYYLGIGNGTQIYVIDPEPCPDSDQGGGGSGGGGSEPKSSDKTHTCPPCPAPEAEGAPSVFLFPPKPKDTLMISRTPEVTCVVVDVSHEDPEVKFNWYVDGVEVHNAKTKPREEQYNSTYRVVSVLTVLHQDWLNGKEYKCKVSNKALPAPIEKTISKAKGQPREPQVYTLPPSRDELTKNQVSLTCLVKGFYPSDIAVEWESNGQPENNYKTTPPVLDSDGSFFLYSKLTVDKSRWQQGNVFSCSVMHEALHNHYTQKSLSLSPGGGGGSGGGGSSLSCRKEQGKFYDHLLRDCISCASICGQHPKQCAYFCENKLRS

SEQ ID NO: 627 - protein, 421 aa, ARTIFICIAL SEQUENCE
  CTLA 4 668 (G4S)2 Fc (G4S)2 TACI 528
KAMHVAQPAVVLASSRGIASFVCEYASPGKATEVRVTVLRQADSQVTEVCAATYMMGNELTFLDDSICTGTSSGNQVNLTIQGLRAMDTGLYICKVELMYPPPYYLGIGNGTQIYVIDPEPSPDSDQGGGGSGGGGSEPKSSDKTHTCPPCPAPEAEGAPSVFLFPPKPKDTLMISRTPEVTCVVVDVSHEDPEVKFNWYVDGVEVHNAKTKPREEQYNSTYRVVSVLTVLHQDWLNGKEYKCKVSNKALPAPIEKTISKAKGQPREPQVYTLPPSRDELTKNQVSLTCLVKGFYPSDIAVEWESNGQPENNYKTTPPVLDSDGSFFLYSKLTVDKSRWQQGNVFSCSVMHEALHNHYTQKSLSLSPGGGGGSGGGGSSLSCRKEQGKFYDHLLRDCISCASICGQHPKQCAYFCENKLRS

SEQ ID NO: 628 - protein, 294 aa, ARTIFICIAL SEQUENCE
  Fc (G4S)2 BCMA (356)
EPKSSDKTHTCPPCPAPEAEGAPSVFLFPPKPKDTLMISRTPEVTCVVVDVSHEDPEVKFNWYVDGVEVHNAKTKPREEQYNSTYRVVSVLTVLHQDWLNGKEYKCKVSNKALPAPIEKTISKAKGQPREPQVYTLPPSRDELTKNQVSLTCLVKGFYPSDIAVEWESNGQPENNYKTTPPVLDSDGSFFLYSKLTVDKSRWQQGNVFSCSVMHEALHNHYTQKSLSLSPGGGGGSGGGGSLQMAGQCSQNEYFDSLLHACIPCQLRCSSNTPPLTCQRYCNASVTNSVKGTNA

SEQ ID NO: 629 - protein, 294 aa, ARTIFICIAL SEQUENCE
  Fc (G4S)2 BCMA (357)
EPKSSDKTHTCPPCPAPEAEGAPSVFLFPPKPKDTLMISRTPEVTCVVVDVSHEDPEVKFNWYVDGVEVHNAKTKPREEQYNSTYRVVSVLTVLHQDWLNGKEYKCKVSNKALPAPIEKTISKAKGQPREPQVYTLPPSRDELTKNQVSLTCLVKGFYPSDIAVEWESNGQPENNYKTTPPVLDSDGSFFLYSKLTVDKSRWQQGNVFSCSVMHEALHNHYTQKSLSLSPGGGGGSGGGGSLQMAGQCSQNEYFDSLLYACIPCQLRCSSNTPPLTCQRYCNASVTNSVKGTNA

SEQ ID NO: 630 - protein, 323 aa, ARTIFICIAL SEQUENCE
  Fc (G4S)2 TACI (516)
EPKSSDKTHTCPPCPAPEAEGAPSVFLFPPKPKDTLMISRTPEVTCVVVDVSHEDPEVKFNWYVDGVEVHNAKTKPREEQYNSTYRVVSVLTVLHQDWLNGKEYKCKVSNKALPAPIEKTISKAKGQPREPQVYTLPPSRDELTKNQVSLTCLVKGFYPSDIAVEWESNGQPENNYKTTPPVLDSDGSFFLYSKLTVDKSRWQQGNVFSCSVMHEALHNHYTQKSLSLSPGGGGGSGGGGSVAMRSCPEEQYWDPLLGTCMSCKTICNHQSQRTCAAFCRSLSCRKEQGKFYDHLLRDCISCASICGQHPKQCAYFCENKLRS

SEQ ID NO: 631 - protein, 427 aa, ARTIFICIAL SEQUENCE
  CTLA4 WT ECD 1 GSG4S Fc (G4S)2 BCMA 356
KAMHVAQPAVVLASSRGIASFVCEYASPGKATEVRVTVLRQADSQVTEVCAATYMMGNELTFLDDSICTGTSSGNQVNLTIQGLRAMDTGLYICKVELMYPPPYYLGIGNGTQIYVIDPEPCPDSDGSGGGGSEPKSSDKTHTCPPCPAPEAEGAPSVFLFPPKPKDTLMISRTPEVTCVVVDVSHEDPEVKFNWYVDGVEVHNAKTKPREEQYNSTYRVVSVLTVLHQDWLNGKEYKCKVSNKALPAPIEKTISKAKGQPREPQVYTLPPSRDELTKNQVSLTCLVKGFYPSDIAVEWESNGQPENNYKTTPPVLDSDGSFFLYSKLTVDKSRWQQGNVFSCSVMHEALHNHYTQKSLSLSPGGGGGSGGGGSLQMAGQCSQNEYFDSLLHACIPCQLRCSSNTPPLTCQRYCNASVTNSVKGTNA

SEQ ID NO: 632 - protein, 427 aa, ARTIFICIAL SEQUENCE
  CTLA4 92 GSG4S Fc (G4S)2 BCMA 356
KAMHVAQPAVVLASSRGIASFVCEYASPWKATEVRVTVLRQADSQVTEVCAATYMMGSELTFPDDSICTGTSSGNQVNLTIRGLRAMDTGLYICKVEQMYPPPYLLGIGNGTQIYVIDPEPCPDSDGSGGGGSEPKSSDKTHTCPPCPAPEAEGAPSVFLFPPKPKDTLMISRTPEVTCVVVDVSHEDPEVKFNWYVDGVEVHNAKTKPREEQYNSTYRVVSVLTVLHQDWLNGKEYKCKVSNKALPAPIEKTISKAKGQPREPQVYTLPPSRDELTKNQVSLTCLVKGFYPSDIAVEWESNGQPENNYKTTPPVLDSDGSFFLYSKLTVDKSRWQQGNVFSCSVMHEALHNHYTQKSLSLSPGGGGGSGGGGSLQMAGQCSQNEYFDSLLHACIPCQLRCSSNTPPLTCQRYCNASVTNSVKGTNA

SEQ ID NO: 633 - protein, 427 aa, ARTIFICIAL SEQUENCE
  CTLA4 165 GSG4S Fc (G4S)2 BCMA 356
KAMHVAQPAVVLASSRGIASFVCEYASPGKATEVRVTVLRQADSQVTEVCAASYMMGNELTFPDDSICTGTSSGNQVNLTIQGLRAMDTGLYICKVEQMYPPPYYLGIGNGTQIYVIDPEPCPDSDGSGGGGSEPKSSDKTHTCPPCPAPEAEGAPSVFLFPPKPKDTLMISRTPEVTCVVVDVSHEDPEVKFNWYVDGVEVHNAKTKPREEQYNSTYRVVSVLTVLHQDWLNGKEYKCKVSNKALPAPIEKTISKAKGQPREPQVYTLPPSRDELTKNQVSLTCLVKGFYPSDIAVEWESNGQPENNYKTTPPVLDSDGSFFLYSKLTVDKSRWQQGNVFSCSVMHEALHNHYTQKSLSLSPGGGGGSGGGGSLQMAGQCSQNEYFDSLLHACIPCQLRCSSNTPPLTCQRYCNASVTNSVKGTNA

SEQ ID NO: 634 - protein, 427 aa, ARTIFICIAL SEQUENCE
  CTLA4 WT ECD 1 GSG4S Fc (G4S)2 BCMA 357
KAMHVAQPAVVLASSRGIASFVCEYASPGKATEVRVTVLRQADSQVTEVCAATYMMGNELTFLDDSICTGTSSGNQVNLTIQGLRAMDTGLYICKVELMYPPPYYLGIGNGTQIYVIDPEPCPDSDGSGGGGSEPKSSDKTHTCPPCPAPEAEGAPSVFLFPPKPKDTLMISRTPEVTCVVVDVSHEDPEVKFNWYVDGVEVHNAKTKPREEQYNSTYRVVSVLTVLHQDWLNGKEYKCKVSNKALPAPIEKTISKAKGQPREPQVYTLPPSRDELTKNQVSLTCLVKGFYPSDIAVEWESNGQPENNYKTTPPVLDSDGSFFLYSKLTVDKSRWQQGNVFSCSVMHEALHNHYTQKSLSLSPGGGGGSGGGGSLQMAGQCSQNEYFDSLLYACIPCQLRCSSNTPPLTCQRYCNASVTNSVKGTNA

SEQ ID NO: 635 - protein, 427 aa, ARTIFICIAL SEQUENCE
  CTLA4 92 GSG4S Fc (G4S)2 BCMA 357
KAMHVAQPAVVLASSRGIASFVCEYASPWKATEVRVTVLRQADSQVTEVCAATYMMGSELTFPDDSICTGTSSGNQVNLTIRGLRAMDTGLYICKVEQMYPPPYLLGIGNGTQIYVIDPEPCPDSDGSGGGGSEPKSSDKTHTCPPCPAPEAEGAPSVFLFPPKPKDTLMISRTPEVTCVVVDVSHEDPEVKFNWYVDGVEVHNAKTKPREEQYNSTYRVVSVLTVLHQDWLNGKEYKCKVSNKALPAPIEKTISKAKGQPREPQVYTLPPSRDELTKNQVSLTCLVKGFYPSDIAVEWESNGQPENNYKTTPPVLDSDGSFFLYSKLTVDKSRWQQGNVFSCSVMHEALHNHYTQKSLSLSPGGGGGSGGGGSLQMAGQCSQNEYFDSLLYACIPCQLRCSSNTPPLTCQRYCNASVTNSVKGTNA

SEQ ID NO: 636 - protein, 427 aa, ARTIFICIAL SEQUENCE
  CTLA4 165 GSG4S Fc (G4S)2 BCMA 357
KAMHVAQPAVVLASSRGIASFVCEYASPGKATEVRVTVLRQADSQVTEVCAASYMMGNELTFPDDSICTGTSSGNQVNLTIQGLRAMDTGLYICKVEQMYPPPYYLGIGNGTQIYVIDPEPCPDSDGSGGGGSEPKSSDKTHTCPPCPAPEAEGAPSVFLFPPKPKDTLMISRTPEVTCVVVDVSHEDPEVKFNWYVDGVEVHNAKTKPREEQYNSTYRVVSVLTVLHQDWLNGKEYKCKVSNKALPAPIEKTISKAKGQPREPQVYTLPPSRDELTKNQVSLTCLVKGFYPSDIAVEWESNGQPENNYKTTPPVLDSDGSFFLYSKLTVDKSRWQQGNVFSCSVMHEALHNHYTQKSLSLSPGGGGGSGGGGSLQMAGQCSQNEYFDSLLYACIPCQLRCSSNTPPLTCQRYCNASVTNSVKGTNA

SEQ ID NO: 637 - protein, 456 aa, ARTIFICIAL SEQUENCE
  CTLA 4 92 GSG4S Fc (G4S)2 TACI 516
KAMHVAQPAVVLASSRGIASFVCEYASPWKATEVRVTVLRQADSQVTEVCAATYMMGSELTFPDDSICTGTSSGNQVNLTIRGLRAMDTGLYICKVEQMYPPPYLLGIGNGTQIYVIDPEPCPDSDGSGGGGSEPKSSDKTHTCPPCPAPEAEGAPSVFLFPPKPKDTLMISRTPEVTCVVVDVSHEDPEVKFNWYVDGVEVHNAKTKPREEQYNSTYRVVSVLTVLHQDWLNGKEYKCKVSNKALPAPIEKTISKAKGQPREPQVYTLPPSRDELTKNQVSLTCLVKGFYPSDIAVEWESNGQPENNYKTTPPVLDSDGSFFLYSKLTVDKSRWQQGNVFSCSVMHEALHNHYTQKSLSLSPGGGGGSGGGGSVAMRSCPEEQYWDPLLGTCMSCKTICNHQSQRTCAAFCRSLSCRKEQGKFYDHLLRDCISCASICGQHPKQCAYFCENKLRS

SEQ ID NO: 638 - protein, 456 aa, ARTIFICIAL SEQUENCE
  CTLA 4 165 GSG4S Fc (G4S)2 TACI 516
KAMHVAQPAVVLASSRGIASFVCEYASPGKATEVRVTVLRQADSQVTEVCAASYMMGNELTFPDDSICTGTSSGNQVNLTIQGLRAMDTGLYICKVEQMYPPPYYLGIGNGTQIYVIDPEPCPDSDGSGGGGSEPKSSDKTHTCPPCPAPEAEGAPSVFLFPPKPKDTLMISRTPEVTCVVVDVSHEDPEVKFNWYVDGVEVHNAKTKPREEQYNSTYRVVSVLTVLHQDWLNGKEYKCKVSNKALPAPIEKTISKAKGQPREPQVYTLPPSRDELTKNQVSLTCLVKGFYPSDIAVEWESNGQPENNYKTTPPVLDSDGSFFLYSKLTVDKSRWQQGNVFSCSVMHEALHNHYTQKSLSLSPGGGGGSGGGGSVAMRSCPEEQYWDPLLGTCMSCKTICNHQSQRTCAAFCRSLSCRKEQGKFYDHLLRDCISCASICGQHPKQCAYFCENKLRS

SEQ ID NO: 639 - protein, 437 aa, ARTIFICIAL SEQUENCE
  CTLA4 92 GSG4S Fc K (G4S)4 BCMA 357
KAMHVAQPAVVLASSRGIASFVCEYASPWKATEVRVTVLRQADSQVTEVCAATYMMGSELTFPDDSICTGTSSGNQVNLTIRGLRAMDTGLYICKVEQMYPPPYLLGIGNGTQIYVIDPEPCPDSDGSGGGGSEPKSSDKTHTCPPCPAPEAEGAPSVFLFPPKPKDTLMISRTPEVTCVVVDVSHEDPEVKFNWYVDGVEVHNAKTKPREEQYNSTYRVVSVLTVLHQDWLNGKEYKCKVSNKALPAPIEKTISKAKGQPREPQVYTLPPCREEMTKNQVSLWCLVKGFYPSDIAVEWESNGQPENNYKTTPPVLDSDGSFFLYSKLTVDKSRWQQGNVFSCSVMHEALHNHYTQKSLSLSPGGGGGSGGGGSGGGGSGGGGSLQMAGQCSQNEYFDSLLYACIPCQLRCSSNTPPLTCQRYCNASVTNSVKGTNA

SEQ ID NO: 640 - protein, 427 aa, ARTIFICIAL SEQUENCE
  CTLA4 92 GSG4S Fc K (G4S)4 TACI 528
KAMHVAQPAVVLASSRGIASFVCEYASPWKATEVRVTVLRQADSQVTEVCAATYMMGSELTFPDDSICTGTSSGNQVNLTIRGLRAMDTGLYICKVEQMYPPPYLLGIGNGTQIYVIDPEPCPDSDGSGGGGSEPKSSDKTHTCPPCPAPEAEGAPSVFLFPPKPKDTLMISRTPEVTCVVVDVSHEDPEVKFNWYVDGVEVHNAKTKPREEQYNSTYRVVSVLTVLHQDWLNGKEYKCKVSNKALPAPIEKTISKAKGQPREPQVCTLPPSREEMTKNQVSLSCAVKGFYPSDIAVEWESNGQPENNYKTTPPVLDSDGSFFLVSKLTVDKSRWQQGNVFSCSVMHEALHNHYTQKSLSLSPGGGGGSGGGGSGGGGSGGGGSSLSCRKEQGKFYDHLLRDCISCASICGQHPKQCAYFCENKLRS

SEQ ID NO: 641 - protein, 437 aa, ARTIFICIAL SEQUENCE
  CTLA4 113 GSG4S Fc K (G4S)4 BCMA 357
KAMHVAQPAVVFASSHGIASFVCEYASPWKATEVRVTVLRQADSQVTEVCAATYMTGNELTFLDDSICTGTSSGNQVNLTIQGLRAMDTGLYICKVEQMYPPPYLLGIGNGTQIYVIDPEPCPDSDGSGGGGSEPKSSDKTHTCPPCPAPEAEGAPSVFLFPPKPKDTLMISRTPEVTCVVVDVSHEDPEVKFNWYVDGVEVHNAKTKPREEQYNSTYRVVSVLTVLHQDWLNGKEYKCKVSNKALPAPIEKTISKAKGQPREPQVYTLPPCREEMTKNQVSLWCLVKGFYPSDIAVEWESNGQPENNYKTTPPVLDSDGSFFLYSKLTVDKSRWQQGNVFSCSVMHEALHNHYTQKSLSLSPGGGGGSGGGGSGGGGSGGGGSLQMAGQCSQNEYFDSLLYACIPCQLRCSSNTPPLTCQRYCNASVTNSVKGTNA

SEQ ID NO: 642 - protein, 427 aa, ARTIFICIAL SEQUENCE
  CTLA4 113 GSG4S Fc H (G4S)4 TACI 528
KAMHVAQPAVVFASSHGIASFVCEYASPWKATEVRVTVLRQADSQVTEVCAATYMTGNELTFLDDSICTGTSSGNQVNLTIQGLRAMDTGLYICKVEQMYPPPYLLGIGNGTQIYVIDPEPCPDSDGSGGGGSEPKSSDKTHTCPPCPAPEAEGAPSVFLFPPKPKDTLMISRTPEVTCVVVDVSHEDPEVKFNWYVDGVEVHNAKTKPREEQYNSTYRVVSVLTVLHQDWLNGKEYKCKVSNKALPAPIEKTISKAKGQPREPQVCTLPPSREEMTKNQVSLSCAVKGFYPSDIAVEWESNGQPENNYKTTPPVLDSDGSFFLVSKLTVDKSRWQQGNVFSCSVMHEALHNHYTQKSLSLSPGGGGGSGGGGSGGGGSGGGGSSLSCRKEQGKFYDHLLRDCISCASICGQHPKQCAYFCENKLRS

SEQ ID NO: 643 - protein, 427 aa, ARTIFICIAL SEQUENCE
  CTLA4 113 GSG4S Fc (G4S)4 TACI 535 (68-110)
KAMHVAQPAVVFASSHGIASFVCEYASPWKATEVRVTVLRQADSQVTEVCAATYMTGNELTFLDDSICTGTSSGNQVNLTIQGLRAMDTGLYICKVEQMYPPPYLLGIGNGTQIYVIDPEPCPDSDGSGGGGSEPKSSDKTHTCPPCPAPEAEGAPSVFLFPPKPKDTLMISRTPEVTCVVVDVSHEDPEVKFNWYVDGVEVHNAKTKPREEQYNSTYRVVSVLTVLHQDWLNGKEYKCKVSNKALPAPIEKTISKAKGQPREPQVYTLPPSRDELTKNQVSLTCLVKGFYPSDIAVEWESNGQPENNYKTTPPVLDSDGSFFLYSKLTVDKSRWQQGNVFSCSVMHEALHNHYTQKSLSLSPGGGGGSGGGGSGGGGSGGGGSSLSCRKEQGKFYDHLLGDCISCASICGQHPKQCAYFCENKLRS

SEQ ID NO: 644 - protein, 466 aa, ARTIFICIAL SEQUENCE
  CTLA4 113 GSG4S Fc (G4S)4 TACI 535 (29-110)
KAMHVAQPAVVFASSHGIASFVCEYASPWKATEVRVTVLRQADSQVTEVCAATYMTGNELTFLDDSICTGTSSGNQVNLTIQGLRAMDTGLYICKVEQMYPPPYLLGIGNGTQIYVIDPEPCPDSDGSGGGGSEPKSSDKTHTCPPCPAPEAEGAPSVFLFPPKPKDTLMISRTPEVTCVVVDVSHEDPEVKFNWYVDGVEVHNAKTKPREEQYNSTYRVVSVLTVLHQDWLNGKEYKCKVSNKALPAPIEKTISKAKGQPREPQVYTLPPSRDELTKNQVSLTCLVKGFYPSDIAVEWESNGQPENNYKTTPPVLDSDGSFFLYSKLTVDKSRWQQGNVFSCSVMHEALHNHYTQKSLSLSPGGGGGSGGGGSGGGGSGGGGSVAMRSCPEEQYWDPLLGTCMSCKTICNHQSQRTCAAFCRSLSCRKEQGKFYDHLLGDCISCASICGQHPKQCAYFCENKLRS

SEQ ID NO: 645 - protein, 437 aa, ARTIFICIAL SEQUENCE
  BCMA 411 GSG4S Fc (G4S)4 CTLA4 186
LQMAGQCSQNEYFDSLLRACIPCQLRCSSNTPPLTCQRYCNASVTNSVKGTNAGSGGGGSEPKSSDKTHTCPPCPAPEAEGAPSVFLFPPKPKDTLMISRTPEVTCVVVDVSHEDPEVKFNWYVDGVEVHNAKTKPREEQYNSTYRVVSVLTVLHQDWLNGKEYKCKVSNKALPAPIEKTISKAKGQPREPQVYTLPPSRDELTKNQVSLTCLVKGFYPSDIAVEWESNGQPENNYKTTPPVLDSDGSFFLYSKLTVDKSRWQQGNVFSCSVMHEALHNHYTQKSLSLSPGGGGGSGGGGSGGGGSGGGGSKAMHVAQPAVVLASSRGIASFVCEYASPWKATEVRVTVLRQADSQVTEVCAATYMMGNELTFLDDSICTGTSSGNQVNLTIQGLRAMDTGLYICKVEQMYPPPYLLGIGNGTQIYVIDPEPCPDSD

SEQ ID NO: 646 - protein, 437 aa, ARTIFICIAL SEQUENCE
  BCMA 405 GSG4S Fc (G4S)4 CTLA4 186
LQMAGQCSQNEYFDSLLKACIPCQLRCSSNTPPLTCQRYCNASVTNSVKGTNAGSGGGGSEPKSSDKTHTCPPCPAPEAEGAPSVFLFPPKPKDTLMISRTPEVTCVVVDVSHEDPEVKFNWYVDGVEVHNAKTKPREEQYNSTYRVVSVLTVLHQDWLNGKEYKCKVSNKALPAPIEKTISKAKGQPREPQVYTLPPSRDELTKNQVSLTCLVKGFYPSDIAVEWESNGQPENNYKTTPPVLDSDGSFFLYSKLTVDKSRWQQGNVFSCSVMHEALHNHYTQKSLSLSPGGGGGSGGGGSGGGGSGGGGSKAMHVAQPAVVLASSRGIASFVCEYASPWKATEVRVTVLRQADSQVTEVCAATYMMGNELTFLDDSICTGTSSGNQVNLTIQGLRAMDTGLYICKVEQMYPPPYLLGIGNGTQIYVIDPEPCPDSD

SEQ ID NO: 647 - protein, 437 aa, ARTIFICIAL SEQUENCE
  BCMA 406 GSG4S Fc (G4S)4 CTLA4 186
LQMAGQCSQNEYFDSLLLACIPCQLRCSSNTPPLTCQRYCNASVTNSVKGTNAGSGGGGSEPKSSDKTHTCPPCPAPEAEGAPSVFLFPPKPKDTLMISRTPEVTCVVVDVSHEDPEVKFNWYVDGVEVHNAKTKPREEQYNSTYRVVSVLTVLHQDWLNGKEYKCKVSNKALPAPIEKTISKAKGQPREPQVYTLPPSRDELTKNQVSLTCLVKGFYPSDIAVEWESNGQPENNYKTTPPVLDSDGSFFLYSKLTVDKSRWQQGNVFSCSVMHEALHNHYTQKSLSLSPGGGGGSGGGGSGGGGSGGGGSKAMHVAQPAVVLASSRGIASFVCEYASPWKATEVRVTVLRQADSQVTEVCAATYMMGNELTFLDDSICTGTSSGNQVNLTIQGLRAMDTGLYICKVEQMYPPPYLLGIGNGTQIYVIDPEPCPDSD

SEQ ID NO: 648 - protein, 427 aa, ARTIFICIAL SEQUENCE
  TACI 541 GSG4S Fc (G4S)4 CTLA4 186
SLSCRKEQGEYYDHLLRDCISCASICGQHPKQCADFCENKLRSGSGGGGSEPKSSDKTHTCPPCPAPEAEGAPSVFLFPPKPKDTLMISRTPEVTCVVVDVSHEDPEVKFNWYVDGVEVHNAKTKPREEQYNSTYRVVSVLTVLHQDWLNGKEYKCKVSNKALPAPIEKTISKAKGQPREPQVYTLPPSRDELTKNQVSLTCLVKGFYPSDIAVEWESNGQPENNYKTTPPVLDSDGSFFLYSKLTVDKSRWQQGNVFSCSVMHEALHNHYTQKSLSLSPGGGGGSGGGGSGGGGSGGGGSKAMHVAQPAVVLASSRGIASFVCEYASPWKATEVRVTVLRQADSQVTEVCAATYMMGNELTFLDDSICTGTSSGNQVNLTIQGLRAMDTGLYICKVEQMYPPPYLLGIGNGTQIYVIDPEPCPDSD

SEQ ID NO: 649 - protein, 437 aa, ARTIFICIAL SEQUENCE
  BCMA 381 GSG4S Fc (G4S)4 CTLA4 WT ECD 1
LQMAGQCSQNEYFDALLYACIPCQLRCSSNTPPLTCQQYCNASVTNSVKGTNAGSGGGGSEPKSSDKTHTCPPCPAPEAEGAPSVFLFPPKPKDTLMISRTPEVTCVVVDVSHEDPEVKFNWYVDGVEVHNAKTKPREEQYNSTYRVVSVLTVLHQDWLNGKEYKCKVSNKALPAPIEKTISKAKGQPREPQVYTLPPSRDELTKNQVSLTCLVKGFYPSDIAVEWESNGQPENNYKTTPPVLDSDGSFFLYSKLTVDKSRWQQGNVFSCSVMHEALHNHYTQKSLSLSPGGGGGSGGGGSGGGGSGGGGSKAMHVAQPAVVLASSRGIASFVCEYASPGKATEVRVTVLRQADSQVTEVCAATYMMGNELTFLDDSICTGTSSGNQVNLTIQGLRAMDTGLYICKVELMYPPPYYLGIGNGTQIYVIDPEPCPDSD

SEQ ID NO: 650 - protein, 437 aa, ARTIFICIAL SEQUENCE
  BCMA 411 GSG4S Fc (G4S)4 CTLA4 WT ECD 1
LQMAGQCSQNEYFDSLLRACIPCQLRCSSNTPPLTCQRYCNASVTNSVKGTNAGSGGGGSEPKSSDKTHTCPPCPAPEAEGAPSVFLFPPKPKDTLMISRTPEVTCVVVDVSHEDPEVKFNWYVDGVEVHNAKTKPREEQYNSTYRVVSVLTVLHQDWLNGKEYKCKVSNKALPAPIEKTISKAKGQPREPQVYTLPPSRDELTKNQVSLTCLVKGFYPSDIAVEWESNGQPENNYKTTPPVLDSDGSFFLYSKLTVDKSRWQQGNVFSCSVMHEALHNHYTQKSLSLSPGGGGGSGGGGSGGGGSGGGGSKAMHVAQPAVVLASSRGIASFVCEYASPGKATEVRVTVLRQADSQVTEVCAATYMMGNELTFLDDSICTGTSSGNQVNLTIQGLRAMDTGLYICKVELMYPPPYYLGIGNGTQIYVIDPEPCPDSD

SEQ ID NO: 651 - protein, 437 aa, ARTIFICIAL SEQUENCE
  BCMA 405 GSG4S Fc (G4S)4 CTLA4 WT ECD 1
LQMAGQCSQNEYFDSLLKACIPCQLRCSSNTPPLTCQRYCNASVTNSVKGTNAGSGGGGSEPKSSDKTHTCPPCPAPEAEGAPSVFLFPPKPKDTLMISRTPEVTCVVVDVSHEDPEVKFNWYVDGVEVHNAKTKPREEQYNSTYRVVSVLTVLHQDWLNGKEYKCKVSNKALPAPIEKTISKAKGQPREPQVYTLPPSRDELTKNQVSLTCLVKGFYPSDIAVEWESNGQPENNYKTTPPVLDSDGSFFLYSKLTVDKSRWQQGNVFSCSVMHEALHNHYTQKSLSLSPGGGGGSGGGGSGGGGSGGGGSKAMHVAQPAVVLASSRGIASFVCEYASPGKATEVRVTVLRQADSQVTEVCAATYMMGNELTFLDDSICTGTSSGNQVNLTIQGLRAMDTGLYICKVELMYPPPYYLGIGNGTQIYVIDPEPCPDSD

SEQ ID NO: 652 - protein, 437 aa, ARTIFICIAL SEQUENCE
  BCMA 406 GSG4S Fc (G4S)4 CTLA4 WT ECD 1
LQMAGQCSQNEYFDSLLLACIPCQLRCSSNTPPLTCQRYCNASVTNSVKGTNAGSGGGGSEPKSSDKTHTCPPCPAPEAEGAPSVFLFPPKPKDTLMISRTPEVTCVVVDVSHEDPEVKFNWYVDGVEVHNAKTKPREEQYNSTYRVVSVLTVLHQDWLNGKEYKCKVSNKALPAPIEKTISKAKGQPREPQVYTLPPSRDELTKNQVSLTCLVKGFYPSDIAVEWESNGQPENNYKTTPPVLDSDGSFFLYSKLTVDKSRWQQGNVFSCSVMHEALHNHYTQKSLSLSPGGGGGSGGGGSGGGGSGGGGSKAMHVAQPAVVLASSRGIASFVCEYASPGKATEVRVTVLRQADSQVTEVCAATYMMGNELTFLDDSICTGTSSGNQVNLTIQGLRAMDTGLYICKVELMYPPPYYLGIGNGTQIYVIDPEPCPDSD

SEQ ID NO: 653 - protein, 427 aa, ARTIFICIAL SEQUENCE
  TACI 541 GSG4S Fc (G4S)4 CTLA4 WT ECD 1
SLSCRKEQGEYYDHLLRDCISCASICGQHPKQCADFCENKLRSGSGGGGSEPKSSDKTHTCPPCPAPEAEGAPSVFLFPPKPKDTLMISRTPEVTCVVVDVSHEDPEVKFNWYVDGVEVHNAKTKPREEQYNSTYRVVSVLTVLHQDWLNGKEYKCKVSNKALPAPIEKTISKAKGQPREPQVYTLPPSRDELTKNQVSLTCLVKGFYPSDIAVEWESNGQPENNYKTTPPVLDSDGSFFLYSKLTVDKSRWQQGNVFSCSVMHEALHNHYTQKSLSLSPGGGGGSGGGGSGGGGSGGGGSKAMHVAQPAVVLASSRGIASFVCEYASPGKATEVRVTVLRQADSQVTEVCAATYMMGNELTFLDDSICTGTSSGNQVNLTIQGLRAMDTGLYICKVELMYPPPYYLGIGNGTQIYVIDPEPCPDSD

SEQ ID NO: 654 - protein, 427 aa, ARTIFICIAL SEQUENCE
  TACI 542 GSG4S Fc (G4S)4 CTLA4 WT ECD 1
SLSCRKEEGKFYDHLLQDCISCASICGQHPKQCAYFCENKLRSGSGGGGSEPKSSDKTHTCPPCPAPEAEGAPSVFLFPPKPKDTLMISRTPEVTCVVVDVSHEDPEVKFNWYVDGVEVHNAKTKPREEQYNSTYRVVSVLTVLHQDWLNGKEYKCKVSNKALPAPIEKTISKAKGQPREPQVYTLPPSRDELTKNQVSLTCLVKGFYPSDIAVEWESNGQPENNYKTTPPVLDSDGSFFLYSKLTVDKSRWQQGNVFSCSVMHEALHNHYTQKSLSLSPGGGGGSGGGGSGGGGSGGGGSKAMHVAQPAVVLASSRGIASFVCEYASPGKATEVRVTVLRQADSQVTEVCAATYMMGNELTFLDDSICTGTSSGNQVNLTIQGLRAMDTGLYICKVELMYPPPYYLGIGNGTQIYVIDPEPCPDSD

SEQ ID NO: 655 - protein, 437 aa, ARTIFICIAL SEQUENCE
  BCMA 357 (G4S)3 CTLA4 92 GSG4S Fc
LQMAGQCSQNEYFDSLLYACIPCQLRCSSNTPPLTCQRYCNASVTNSVKGTNAGGGGSGGGGSGGGGSGGGGSKAMHVAQPAVVLASSRGIASFVCEYASPWKATEVRVTVLRQADSQVTEVCAATYMMGSELTFPDDSICTGTSSGNQVNLTIRGLRAMDTGLYICKVEQMYPPPYLLGIGNGTQIYVIDPEPCPDSDGSGGGGSEPKSSDKTHTCPPCPAPEAEGAPSVFLFPPKPKDTLMISRTPEVTCVVVDVSHEDPEVKFNWYVDGVEVHNAKTKPREEQYNSTYRVVSVLTVLHQDWLNGKEYKCKVSNKALPAPIEKTISKAKGQPREPQVYTLPPSRDELTKNQVSLTCLVKGFYPSDIAVEWESNGQPENNYKTTPPVLDSDGSFFLYSKLTVDKSRWQQGNVFSCSVMHEALHNHYTQKSLSLSPG

SEQ ID NO: 656 - protein, 437 aa, ARTIFICIAL SEQUENCE
  BCMA 357 GSG4S Fc (G4S)3 CTLA4 92
LQMAGQCSQNEYFDSLLYACIPCQLRCSSNTPPLTCQRYCNASVTNSVKGTNAGSGGGGSEPKSSDKTHTCPPCPAPEAEGAPSVFLFPPKPKDTLMISRTPEVTCVVVDVSHEDPEVKFNWYVDGVEVHNAKTKPREEQYNSTYRVVSVLTVLHQDWLNGKEYKCKVSNKALPAPIEKTISKAKGQPREPQVYTLPPSRDELTKNQVSLTCLVKGFYPSDIAVEWESNGQPENNYKTTPPVLDSDGSFFLYSKLTVDKSRWQQGNVFSCSVMHEALHNHYTQKSLSLSPGGGGGSGGGGSGGGGSGGGGSKAMHVAQPAVVLASSRGIASFVCEYASPWKATEVRVTVLRQADSQVTEVCAATYMMGSELTFPDDSICTGTSSGNQVNLTIRGLRAMDTGLYICKVEQMYPPPYLLGIGNGTQIYVIDPEPCPDSD

SEQ ID NO: 657 - protein, 437 aa, ARTIFICIAL SEQUENCE
  CTLA4 92 (G4S)4 BCMA 357  GSG4S Fc
KAMHVAQPAVVLASSRGIASFVCEYASPWKATEVRVTVLRQADSQVTEVCAATYMMGSELTFPDDSICTGTSSGNQVNLTIRGLRAMDTGLYICKVEQMYPPPYLLGIGNGTQIYVIDPEPCPDSDGGGGSGGGGSGGGGSGGGGSLQMAGQCSQNEYFDSLLYACIPCQLRCSSNTPPLTCQRYCNASVTNSVKGTNAGSGGGGSEPKSSDKTHTCPPCPAPEAEGAPSVFLFPPKPKDTLMISRTPEVTCVVVDVSHEDPEVKFNWYVDGVEVHNAKTKPREEQYNSTYRVVSVLTVLHQDWLNGKEYKCKVSNKALPAPIEKTISKAKGQPREPQVYTLPPSRDELTKNQVSLTCLVKGFYPSDIAVEWESNGQPENNYKTTPPVLDSDGSFFLYSKLTVDKSRWQQGNVFSCSVMHEALHNHYTQKSLSLSPG

SEQ ID NO: 658 - protein, 432 aa, ARTIFICIAL SEQUENCE
  CTLA4 92 GSG4S Fc (G4S)3 BCMA 357
KAMHVAQPAVVLASSRGIASFVCEYASPWKATEVRVTVLRQADSQVTEVCAATYMMGSELTFPDDSICTGTSSGNQVNLTIRGLRAMDTGLYICKVEQMYPPPYLLGIGNGTQIYVIDPEPCPDSDGSGGGGSEPKSSDKTHTCPPCPAPEAEGAPSVFLFPPKPKDTLMISRTPEVTCVVVDVSHEDPEVKFNWYVDGVEVHNAKTKPREEQYNSTYRVVSVLTVLHQDWLNGKEYKCKVSNKALPAPIEKTISKAKGQPREPQVYTLPPSRDELTKNQVSLTCLVKGFYPSDIAVEWESNGQPENNYKTTPPVLDSDGSFFLYSKLTVDKSRWQQGNVFSCSVMHEALHNHYTQKSLSLSPGGGGGSGGGGSGGGGSLQMAGQCSQNEYFDSLLYACIPCQLRCSSNTPPLTCQRYCNASVTNSVKGTNA

SEQ ID NO: 659 - protein, 442 aa, ARTIFICIAL SEQUENCE
  CTLA4 92 GSG4S Fc (G4S)5 BCMA 357
KAMHVAQPAVVLASSRGIASFVCEYASPWKATEVRVTVLRQADSQVTEVCAATYMMGSELTFPDDSICTGTSSGNQVNLTIRGLRAMDTGLYICKVEQMYPPPYLLGIGNGTQIYVIDPEPCPDSDGSGGGGSEPKSSDKTHTCPPCPAPEAEGAPSVFLFPPKPKDTLMISRTPEVTCVVVDVSHEDPEVKFNWYVDGVEVHNAKTKPREEQYNSTYRVVSVLTVLHQDWLNGKEYKCKVSNKALPAPIEKTISKAKGQPREPQVYTLPPSRDELTKNQVSLTCLVKGFYPSDIAVEWESNGQPENNYKTTPPVLDSDGSFFLYSKLTVDKSRWQQGNVFSCSVMHEALHNHYTQKSLSLSPGGGGGSGGGGSGGGGSGGGGSGGGGSLQMAGQCSQNEYFDSLLYACIPCQLRCSSNTPPLTCQRYCNASVTNSVKGTNA

SEQ ID NO: 660 - protein, 291 aa, ARTIFICIAL SEQUENCE
  BCMA (357) GSG4S Fc H
LQMAGQCSQNEYFDSLLYACIPCQLRCSSNTPPLTCQRYCNASVTNSVKGTNAGSGGGGSEPKSSDKTHTCPPCPAPEAEGAPSVFLFPPKPKDTLMISRTPEVTCVVVDVSHEDPEVKFNWYVDGVEVHNAKTKPREEQYNSTYRVVSVLTVLHQDWLNGKEYKCKVSNKALPAPIEKTISKAKGQPREPQVCTLPPSREEMTKNQVSLSCAVKGFYPSDIAVEWESNGQPENNYKTTPPVLDSDGSFFLVSKLTVDKSRWQQGNVFSCSVMHEALHNHYTQKSLSLSPG

SEQ ID NO: 661 - protein, 294 aa, ARTIFICIAL SEQUENCE
  Fc (G4S)4 TACI (541)
EPKSSDKTHTCPPCPAPEAEGAPSVFLFPPKPKDTLMISRTPEVTCVVVDVSHEDPEVKFNWYVDGVEVHNAKTKPREEQYNSTYRVVSVLTVLHQDWLNGKEYKCKVSNKALPAPIEKTISKAKGQPREPQVYTLPPSRDELTKNQVSLTCLVKGFYPSDIAVEWESNGQPENNYKTTPPVLDSDGSFFLYSKLTVDKSRWQQGNVFSCSVMHEALHNHYTQKSLSLSPGGGGGSGGGGSGGGGSGGGGSSLSCRKEQGEYYDHLLRDCISCASICGQHPKQCADFCENKLRS

SEQ ID NO: 662 - protein, 364 aa, ARTIFICIAL SEQUENCE
  CTLA4 (92) GSG4S Fc K
KAMHVAQPAVVLASSRGIASFVCEYASPWKATEVRVTVLRQADSQVTEVCAATYMMGSELTFPDDSICTGTSSGNQVNLTIRGLRAMDTGLYICKVEQMYPPPYLLGIGNGTQIYVIDPEPCPDSDGSGGGGSEPKSSDKTHTCPPCPAPEAEGAPSVFLFPPKPKDTLMISRTPEVTCVVVDVSHEDPEVKFNWYVDGVEVHNAKTKPREEQYNSTYRVVSVLTVLHQDWLNGKEYKCKVSNKALPAPIEKTISKAKGQPREPQVYTLPPCREEMTKNQVSLWCLVKGFYPSDIAVEWESNGQPENNYKTTPPVLDSDGSFFLYSKLTVDKSRWQQGNVFSCSVMHEALHNHYTQKSLSLSPG

SEQ ID NO: 663 - protein, 364 aa, ARTIFICIAL SEQUENCE; identical to SEQ ID NO: 662
  CTLA4 (113)  GSG4S FcK

SEQ ID NO: 664 - protein, 510 aa, ARTIFICIAL SEQUENCE
  CTLA4 (92) GSG4S Fc K (G4S)4 (92)
KAMHVAQPAVVLASSRGIASFVCEYASPWKATEVRVTVLRQADSQVTEVCAATYMMGSELTFPDDSICTGTSSGNQVNLTIRGLRAMDTGLYICKVEQMYPPPYLLGIGNGTQIYVIDPEPCPDSDGSGGGGSEPKSSDKTHTCPPCPAPEAEGAPSVFLFPPKPKDTLMISRTPEVTCVVVDVSHEDPEVKFNWYVDGVEVHNAKTKPREEQYNSTYRVVSVLTVLHQDWLNGKEYKCKVSNKALPAPIEKTISKAKGQPREPQVYTLPPCREEMTKNQVSLWCLVKGFYPSDIAVEWESNGQPENNYKTTPPVLDSDGSFFLYSKLTVDKSRWQQGNVFSCSVMHEALHNHYTQKSLSLSPGGGGGSGGGGSGGGGSGGGGSKAMHVAQPAVVLASSRGIASFVCEYASPWKATEVRVTVLRQADSQVTEVCAATYMMGSELTFPDDSICTGTSSGNQVNLTIRGLRAMDTGLYICKVEQMYPPPYLLGIGNGTQIYVIDPEPCPDSD

SEQ ID NO: 665 - protein, 30 aa, ARTIFICIAL SEQUENCE
  LINKER
EAAAKEAAAKEAAAKEAAAKEAAAKEAAAK

SEQ ID NO: 666 - protein, 293 aa, ARTIFICIAL SEQUENCE
  FULL LENGTH TACI
MSGLGRSRRGGRSRVDQEERFPQGLWTGVAMRSCPEEQYWDPLLGTCMSCKTICNHQSQRTCAAFCRSLSCRKEQGKFYDHLLRDCISCASICGQHPKQCAYFCENKLRSPVNLPPELRRQRSGEVENNSDNSGRYQGLEHRGSEASPALPGLKLSADQVALVYSTLGLCLCAVLCCFLVAVACFLKKRGDPCSCQPRSRPRQSPAKSSQDHAMEAGSPVSTSPEPVETCSFCFPECRAPTQESAVTPGTPDPTCAGRWGCHTRTTVLQPCPHIPDSGLGIVCVPAQEGGPGA

SEQ ID NO: 667 - protein, 184 aa, ARTIFICIAL SEQUENCE
  FULL LENGTH BCMA
MLQMAGQCSQNEYFDSLLHACIPCQLRCSSNTPPLTCQRYCNASVTNSVKGTNAILWTCLGLSLIISLAVFVLMFLLRKINSEPLKDEFKNTGSGLLGMANIDLEKSRTGDEIILPRGLEYTVEECTCEDCIKSKPKVDSDHCFPLPAMEEGATILVTTKTNDYCKSLPAALSATEIEKSISAR

SEQ ID NO: 668 - protein, 126 aa, ARTIFICIAL SEQUENCE
  CTLA4 WT ECD C122S
KAMHVAQPAVVLASSRGIASFVCEYASPGKATEVRVTVLRQADSQVTEVCAATYMMGNELTFLDDSICTGTSSGNQVNLTIQGLRAMDTGLYICKVELMYPPPYYLGIGNGTQIYVIDPEPSPDSD

SEQ ID NO: 669 - protein, 230 aa, ARTIFICIAL SEQUENCE
  Fc K S139C, D141E, L143M, T151W
EPKSSDKTHTCPPCPAPEAEGAPSVFLFPPKPKDTLMISRTPEVTCVVVDVSHEDPEVKFNWYVDGVEVHNAKTKPREEQYNSTYRVVSVLTVLHQDWLNGKEYKCKVSNKALPAPIEKTISKAKGQPREPQVYTLPPCREEMTKNQVSLWCLVKGFYPSDIAVEWESNGQPENNYKTTPPVLDSDGSFFLYSKLTVDKSRWQQGNVFSCSVMHEALHNHYTQKSLSLSP

SEQ ID NO: 670 - protein, 230 aa, ARTIFICIAL SEQUENCE
  Fc H Y134C, D141E, L143M, T151S, L153A
EPKSSDKTHTCPPCPAPEAEGAPSVFLFPPKPKDTLMISRTPEVTCVVVDVSHEDPEVKFNWYVDGVEVHNAKTKPREEQYNSTYRVVSVLTVLHQDWLNGKEYKCKVSNKALPAPIEKTISKAKGQPREPQVCTLPPSREEMTKNQVSLSCAVKGFYPSDIAVEWESNGQPENNYKTTPPVLDSDGSFFLVSKLTVDKSRWQQGNVFSCSVMHEALHNHYTQKSLSLSP

SEQ ID NO: 671 - protein, 25 aa, ARTIFICIAL SEQUENCE
  LINKER
GGGGSGGGGSGGGGSGGGGSGGGGS

SEQ ID NO: 672 - protein, 126 aa, ARTIFICIAL SEQUENCE; identical to SEQ ID NO: 154
  CTLA4 A31Y/L106E

SEQ ID NO: 673 - protein, 43 aa, ARTIFICIAL SEQUENCE
  TACI L82P ECD
SLSCRKEQGKFYDHPLRDCISCASICGQHPKQCAYFCENKLRS

SEQ ID NO: 674 - protein, 43 aa, ARTIFICIAL SEQUENCE
  TACI D85E, K98T ECD
SLSCRKEQGKFYDHLLRECISCASICGQHPTQCAYFCENKLRS

SEQ ID NO: 675 - protein, 43 aa, ARTIFICIAL SEQUENCE
  TACI I87L, K98T ECD
SLSCRKEQGKFYDHLLRDCLSCASICGQHPTQCAYFCENKLRS

SEQ ID NO: 676 - protein, 43 aa, ARTIFICIAL SEQUENCE; identical to SEQ ID NO: 538
  TACI A101D ECD

SEQ ID NO: 677 - protein, 43 aa, ARTIFICIAL SEQUENCE
  TACI C86Y ECD
SLSCRKEQGKFYDHLLRDYISCASICGQHPKQCAYFCENKLRS

SEQ ID NO: 678 - protein, 43 aa, ARTIFICIAL SEQUENCE
  TACI L82P, I87L ECD
SLSCRKEQGKFYDHPLRDCLSCASICGQHPKQCAYFCENKLRS

SEQ ID NO: 679 - protein, 43 aa, ARTIFICIAL SEQUENCE
  TACI G76S, P97S ECD
SLSCRKEQSKFYDHLLRDCISCASICGQHSKQCAYFCENKLRS

SEQ ID NO: 680 - protein, 43 aa, ARTIFICIAL SEQUENCE
  TACI L83S, F103S ECD
SLSCRKEQGKFYDHLSRDCISCASICGQHPKQCAYSCENKLRS

SEQ ID NO: 681 - protein, 43 aa, ARTIFICIAL SEQUENCE
  TACI L82H ECD
SLSCRKEQGKFYDHHLRDCISCASICGQHPKQCAYFCENKLRS

SEQ ID NO: 682 - protein, 82 aa, ARTIFICIAL SEQUENCE
  TACI D85V ECD
VAMRSCPEEQYWDPLLGTCMSCKTICNHQSQRTCAAFCRSLSCRKEQGKFYDHLLRVCISCASICGQHPKQCAYFCENKLRS

SEQ ID NO: 683 - protein, 82 aa, ARTIFICIAL SEQUENCE
  TACI E74V ECD
VAMRSCPEEQYWDPLLGTCMSCKTICNHQSQRTCAAFCRSLSCRKVQGKFYDHLLRDCISCASICGQHPKQCAYFCENKLRS

SEQ ID NO: 684 - protein, 82 aa, ARTIFICIAL SEQUENCE
  TACI R84L ECD
VAMRSCPEEQYWDPLLGTCMSCKTICNHQSQRTCAAFCRSLSCRKEQGKFYDHLLLDCISCASICGQHPKQCAYFCENKLRS

SEQ ID NO: 685 - protein, 82 aa, ARTIFICIAL SEQUENCE
  TACI K77E, R84L, F103Y ECD
VAMRSCPEEQYWDPLLGTCMSCKTICNHQSQRTCAAFCRSLSCRKEQGEFYDHLLLDCISCASICGQHPKQCAYYCENKLRS

SEQ ID NO: 686 - protein, 82 aa, ARTIFICIAL SEQUENCE
  TACI Y79F, Q99E ECD
VAMRSCPEEQYWDPLLGTCMSCKTICNHQSQRTCAAFCRSLSCRKEQGKFFDHLLRDCISCASICGQHPKECAYFCENKLRS

SEQ ID NO: 687 - protein, 82 aa, ARTIFICIAL SEQUENCE
  TACI Y79F ECD
VAMRSCPEEQYWDPLLGTCMSCKTICNHQSQRTCAAFCRSLSCRKEQGKFFDHLLRDCISCASICGQHPKQCAYFCENKLRS

SEQ ID NO: 688 - protein, 82 aa, ARTIFICIAL SEQUENCE
  TACI R84G ECD
VAMRSCPEEQYWDPLLGTCMSCKTICNHQSQRTCAAFCRSLSCRKEQGKFYDHLLGDCISCASICGQHPKQCAYFCENKLRS

SEQ ID NO: 689 - protein, 82 aa, ARTIFICIAL SEQUENCE; identical to SEQ ID NO: 522
  TACI A101D ECD

SEQ ID NO: 690 - protein, 82 aa, ARTIFICIAL SEQUENCE
  TACI K77E, R84Q ECD
VAMRSCPEEQYWDPLLGTCMSCKTICNHQSQRTCAAFCRSLSCRKEQGEFYDHLLQDCISCASICGQHPKQCAYFCENKLRS

SEQ ID NO: 691 - protein, 82 aa, ARTIFICIAL SEQUENCE
  TACI K77E, A101D ECD
VAMRSCPEEQYWDPLLGTCMSCKTICNHQSQRTCAAFCRSLSCRKEQGEFYDHLLRDCISCASICGQHPKQCDYFCENKLRS

SEQ ID NO: 692 - protein, 82 aa, ARTIFICIAL SEQUENCE
  TACI K77E, F78Y, Y102D ECD
VAMRSCPEEQYWDPLLGTCMSCKTICNHQSQRTCAAFCRSLSCRKEQGEYYDHLLRDCISCASICGQHPKQCADFCENKLRS

SEQ ID NO: 693 - protein, 82 aa, ARTIFICIAL SEQUENCE
  TACI Q75E, R84Q ECD
VAMRSCPEEQYWDPLLGTCMSCKTICNHQSQRTCAAFCRSLSCRKEEGKFYDHLLQDCISCASICGQHPKQCAYFCENKLRS

SEQ ID NO: 694 - protein, 82 aa, ARTIFICIAL SEQUENCE
  TACI Q75R, R84G, I92V ECD
VAMRSCPEEQYWDPLLGTCMSCKTICNHQSQRTCAAFCRSLSCRKERGKFYDHLLGDCISCASVCGQHPKQCAYFCENKLRS

SEQ ID NO: 695 - protein, 82 aa, ARTIFICIAL SEQUENCE
  TACI K77E, A101D, Y102D ECD
VAMRSCPEEQYWDPLLGTCMSCKTICNHQSQRTCAAFCRSLSCRKEQGEFYDHLLRDCISCASICGQHPKQCDDFCENKLRS

SEQ ID NO: 696 - protein, 82 aa, ARTIFICIAL SEQUENCE
  TACI R84Q ECD
VAMRSCPEEQYWDPLLGTCMSCKTICNHQSQRTCAAFCRSLSCRKEQGKFYDHLLQDCISCASICGQHPKQCAYFCENKLRS

SEQ ID NO: 697 - protein, 82 aa, ARTIFICIAL SEQUENCE
  TACI R84Q, S88N, A101D ECD
VAMRSCPEEQYWDPLLGTCMSCKTICNHQSQRTCAAFCRSLSCRKEQGKFYDHLLQDCINCASICGQHPKQCDYFCENKLRS

SEQ ID NO: 698 - protein, 82 aa, ARTIFICIAL SEQUENCE
  TACI K77E ECD
VAMRSCPEEQYWDPLLGTCMSCKTICNHQSQRTCAAFCRSLSCRKEQGEFYDHLLRDCISCASICGQHPKQCAYFCENKLRS

SEQ ID NO: 699 - protein, 82 aa, ARTIFICIAL SEQUENCE
  TACI R84Q, F103V ECD
VAMRSCPEEQYWDPLLGTCMSCKTICNHQSQRTCAAFCRSLSCRKEQGKFYDHLLQDCISCASICGQHPKQCAYVCENKLRS

SEQ ID NO: 700 - protein, 82 aa, ARTIFICIAL SEQUENCE
  TACI K77E, Q95R, A101D ECD
VAMRSCPEEQYWDPLLGTCMSCKTICNHQSQRTCAAFCRSLSCRKEQGEFYDHLLRDCISCASICGRHPKQCDYFCENKLRS

SEQ ID NO: 701 - protein, 82 aa, ARTIFICIAL SEQUENCE
  TACI I87M, A101D ECD
VAMRSCPEEQYWDPLLGTCMSCKTICNHQSQRTCAAFCRSLSCRKEQGKFYDHLLRDCMSCASICGQHPKQCDYFCENKLRS

SEQ ID NO: 702 - protein, 660 aa, ARTIFICIAL SEQUENCE
  CTLA4 113 GSG4S Fc K/ BCMA 357 GSG4S Fc H
KAMHVAQPAVVFASSHGIASFVCEYASPWKATEVRVTVLRQADSQVTEVCAATYMTGNELTFLDDSICTGTSSGNQVNLTIQGLRAMDTGLYICKVEQMYPPPYLLGIGNGTQIYVIDPEPCPDSDGSGGGGSEPKSSDKTHTCPPCPAPEAEGAPSVFLFPPKPKDTLMISRTPEVTCVVVDVSHEDPEVKFNWYVDGVEVHNAKTKPREEQYNSTYRVVSVLTVLHQDWLNGKEYKCKVSNKALPAPIEKTISKAKGQPREPQVYTLPPCREEMTKNQVSLWCLVKGFYPSDIAVEWESNGQPENNYKTTPPVLDSDGSFFLYSKLTVDKSRWQQGNVFSCSVMHEALHNHYTQKSLSLSPGLQMAGQCSQNEYFDSLLYACIPCQLRCSSNTPPLTCQRYCNASVTNSVKGTNAGSGGSGGSGGSGSEPKSSDKTHTCPPCPAPEAEGAPSVFLFPPKPKDTLMISRTPEVTCVVVDVSHEDPEVKFNWYVDGVEVHNAKTKPREEQYNSTYRVVSVLTVLHQDWLNGKEYKCKVSNKALPAPIEKTISKAKGQPREPQVCTLPPSREEMTKNQVSLSCAVKGFYPSDIAVEWESNGQPENNYKTTPPVLDSDGSFFLVSKLTVDKSRWQQGNVFSCSVMHEALHNHYTQKSLSLSP

SEQ ID NO: 703 - protein, 247 aa, ARTIFICIAL SEQUENCE
  TACI 516  (EAAAK)6 CTLA 4 WT ECD 1
VAMRSCPEEQYWDPLLGTCMSCKTICNHQSQRTCAAFCRSLSCRKEQGKFYDHLLRDCISCASICGQHPKQCAYFCENKLRSEAAAKEAAAKEAAAKEAAAKEAAAKEAAAKKAMHVAQPAVVLASSRGIASFVCEYASPGKATEVRVTVLRQADSQVTEVCAATYMMGNELTFLDDSICTGTSSGNQVNLTIQGLRAMDTGLYICKVELMYPPPYYLGIGNGTQIYVIDPEPCPDSDQDYKDDDDK

SEQ ID NO: 704 - protein, 247 aa, ARTIFICIAL SEQUENCE; identical to SEQ ID NO: 703
  TACI 516  (EAAAK)6 CTLA 4 668

SEQ ID NO: 705 - protein, 208 aa, ARTIFICIAL SEQUENCE
  TACI 528  (EAAAK)6 CTLA 4 WT ECD 1
SLSCRKEQGKFYDHLLRDCISCASICGQHPKQCAYFCENKLRSEAAAKEAAAKEAAAKEAAAKEAAAKEAAAKKAMHVAQPAVVLASSRGIASFVCEYASPGKATEVRVTVLRQADSQVTEVCAATYMMGNELTFLDDSICTGTSSGNQVNLTIQGLRAMDTGLYICKVELMYPPPYYLGIGNGTQIYVIDPEPCPDSDQDYKDDDDK

SEQ ID NO: 706 - protein, 208 aa, ARTIFICIAL SEQUENCE
  TACI 528  (EAAAK)6 CTLA 4 668
SLSCRKEQGKFYDHLLRDCISCASICGQHPKQCAYFCENKLRSEAAAKEAAAKEAAAKEAAAKEAAAKEAAAKKAMHVAQPAVVLASSRGIASFVCEYASPGKATEVRVTVLRQADSQVTEVCAATYMMGNELTFLDDSICTGTSSGNQVNLTIQGLRAMDTGLYICKVELMYPPPYYLGIGNGTQIYVIDPEPSPDSDQDYKDDDDK

SEQ ID NO: 707 - protein, 232 aa, ARTIFICIAL SEQUENCE
  TACI 516  (G4S)3 CTLA 4 668
VAMRSCPEEQYWDPLLGTCMSCKTICNHQSQRTCAAFCRSLSCRKEQGKFYDHLLRDCISCASICGQHPKQCAYFCENKLRSGGGGSGGGGSGGGGSKAMHVAQPAVVLASSRGIASFVCEYASPGKATEVRVTVLRQADSQVTEVCAATYMMGNELTFLDDSICTGTSSGNQVNLTIQGLRAMDTGLYICKVELMYPPPYYLGIGNGTQIYVIDPEPSPDSDQDYKDDDDK

SEQ ID NO: 708 - protein, 193 aa, ARTIFICIAL SEQUENCE
  TACI 528  (G4S)3 CTLA 4 668
SLSCRKEQGKFYDHLLRDCISCASICGQHPKQCAYFCENKLRSGGGGSGGGGSGGGGSKAMHVAQPAVVLASSRGIASFVCEYASPGKATEVRVTVLRQADSQVTEVCAATYMMGNELTFLDDSICTGTSSGNQVNLTIQGLRAMDTGLYICKVELMYPPPYYLGIGNGTQIYVIDPEPSPDSDQDYKDDDDK

SEQ ID NO: 709 - protein, 166 aa, artificial sequence
  TACI ECD (1-166)
MSGLGRSRRGGRSRVDQEERFPQGLWTGVAMRSCPEEQYWDPLLGTCMSCKTICNHQSQRTCAAFCRSLSCRKEQGKFYDHLLRDCISCASICGQHPKQCAYFCENKLRSPVNLPPELRRQRSGEVENNSDNSGRYQGLEHRGSEASPALPGLKLSADQVALVYST

SEQ ID NO: 710 - protein, 54 aa, artificial sequence
  BCMA ECD (1-54)
MLQMAGQCSQNEYFDSLLHACIPCQLRCSSNTPPLTCQRYCNASVTNSVKGTNA

SEQ ID NO: 711 - protein, 5 aa, artificial sequence
  1xEAAAK
EAAAK

SEQ ID NO: 712 - protein, 10 aa, artificial sequence
  2xEAAAK
EAAAKEAAAK

SEQ ID NO: 713 - protein, 15 aa, artificial sequence
  3xEAAAK
EAAAKEAAAKEAAAK

SEQ ID NO: 714 - protein, 20 aa, artificial sequence
  4xEAAAK
EAAAKEAAAKEAAAKEAAAK

SEQ ID NO: 715 - protein, 25 aa, artificial sequence
  5xEAAAK
EAAAKEAAAKEAAAKEAAAKEAAAK

SEQ ID NO: 716 - protein, 232 aa, artificial sequence
  knob Fc
EPKSSDKTHTCPPCPAPEAEGAPSVFLFPPKPKDTLMISRTPEVTCVVVDVSHEDPEVKFNWYVDGVEVHNAKTKPREEQYNSTYRVVSVLTVLHQDWLNGKEYKCKVSNKALPAPIEKTISKAKGQPREPQVYTLPPCREEMTKNQVSLWCLVKGFYPSDIAVEWESNGQPENNYKTTPPVLDSDGSFFLYSKLTVDKSRWQQGNVFSCSVMHEALHNHYTQKSLSLSPGK

SEQ ID NO: 717 - protein, 232 aa, artificial sequence
  hole Fc
EPKSSDKTHTCPPCPAPEAEGAPSVFLFPPKPKDTLMISRTPEVTCVVVDVSHEDPEVKFNWYVDGVEVHNAKTKPREEQYNSTYRVVSVLTVLHQDWLNGKEYKCKVSNKALPAPIEKTISKAKGQPREPQVCTLPPSREEMTKNQVSLSCAVKGFYPSDIAVEWESNGQPENNYKTTPPVLDSDGSFFLVSKLTVDKSRWQQGNVFSCSVMHEALHNHYTQKSLSLSPGK

SEQ ID NO: 718 - protein, 81 aa, artificial sequence
  atacicept (TACI portion, 30-110)
AMRSCPEEQYWDPLLGTCMSCKTICNHQSQRTCAAFCRSLSCRKEQGKFYDHLLRDCISCASICGQHPKQCAYFCENKLRS

SEQ ID NO: 719 - protein, 106 aa, artificial sequence
  telitacicept (TACI portion, 13-118)
SRVDQEERFPQGLWTGVAMRSCPEEQYWDPLLGTCMSCKTICNHQSQRTCAAFCRSLSCRKEQGKFYDHLLRDCISCASICGQHPKQCAYFCENKLRSPVNLPPEL

SEQ ID NO: 720 - protein, 313 aa, artificial sequence
  atacicept
AMRSCPEEQYWDPLLGTCMSCKTICNHQSQRTCAAFCRSLSCRKEQGKFYDHLLRDCISCASICGQHPKQCAYFCENKLRSEPKSSDKTHTCPPCPAPEAEGAPSVFLFPPKPKDTLMISRTPEVTCVVVDVSHEDPEVKFNWYVDGVEVHNAKTKPREEQYNSTYRVVSVLTVLHQDWLNGKEYKCKVSNKALPSSIEKTISKAKGQPREPQVYTLPPSRDELTKNQVSLTCLVKGFYPSDIAVEWESNGQPENNYKTTPPVLDSDGSFFLYSKLTVDKSRWQQGNVFSCSVMHEALHNHYTQKSLSLSPGK

SEQ ID NO: 721 - protein, 13 aa, artificial sequence
  linker
GGGGSGGGGSAAA

SEQ ID NO: 722 - protein, 231 aa, artificial sequence
  Fc with C220S/E233P/L234V/L235A/G236del/S267K
EPKSSDKTHTCPPCPAPPVAGPSVFLFPPKPKDTLMISRTPEVTCVVVDVKHEDPEVKFNWYVDGVEVHNAKTKPREEQYNSTYRVVSVLTVLHQDWLNGKEYKCKVSNKALPAPIEKTISKAKGQPREPQVYTLPPSREEMTKNQVSLTCLVKGFYPSDIAVEWESNGQPENNYKTTPPVLDSDGSFFLYSKLTVDKSRWQQGNVFSCSVMHEALHNHYTQKSLSLSPGK

SEQ ID NO: 723 - protein, 231 aa, artificial sequence
  Fc (C5S (C220S), R77C, (R292C),  N82G (N297G), V87C (V302C), L232del (K447del))
EPKSSDKTHTCPPCPAPELLGGPSVFLFPPKPKDTLMISRTPEVTCVVVDVSHEDPEVKFNWYVDGVEVHNAKTKPCEEQYGSTYRCVSVLTVLHQDWLNGKEYKCKVSNKALPAPIEKTISKAKGQPREPQVYTLPPSREEMTKNQVSLTCLVKGFYPSDIAVEWESNGQPENNYKTTPPVLDSDGSFFLYSKLTVDKSRWQQGNVFSCSVMHEALHNHYTQKSLSLSPG

SEQ ID NO: 724 - protein, 231 aa, artificial sequence
  Fc with C220S/L234A/L235E/G237A/K447del
EPKSSDKTHTCPPCPAPEAEGAPSVFLFPPKPKDTLMISRTPEVTCVVVDVSHEDPEVKFNWYVDGVEVHNAKTKPREEQYNSTYRVVSVLTVLHQDWLNGKEYKCKVSNKALPAPIEKTISKAKGQPREPQVYTLPPSREEMTKNQVSLTCLVKGFYPSDIAVEWESNGQPENNYKTTPPVLDSDGSFFLYSKLTVDKSRWQQGNVFSCSVMHEALHNHYTQKSLSLSPG

SEQ ID NO: 725 - protein, 230 aa, artificial sequence
  Fc with C220S/E233P/L234V/L235A/G236del/S267K/K447del
EPKSSDKTHTCPPCPAPPVAGPSVFLFPPKPKDTLMISRTPEVTCVVVDVKHEDPEVKFNWYVDGVEVHNAKTKPREEQYNSTYRVVSVLTVLHQDWLNGKEYKCKVSNKALPAPIEKTISKAKGQPREPQVYTLPPSREEMTKNQVSLTCLVKGFYPSDIAVEWESNGQPENNYKTTPPVLDSDGSFFLYSKLTVDKSRWQQGNVFSCSVMHEALHNHYTQKSLSLSPG

SEQ ID NO: 726 - protein, 235 aa, artificial sequence
  IgG2 Fc
TKVDKTVERKCCVECPPCPAPPVAGPSVFLFPPKPKDTLMISRTPEVTCVVVDVSHEDPEVQFNWYVDGVEVHNAKTKPREEQFNSTFRVVSVLTVVHQDWLNGKEYKCKVSNKGLPAPIEKTISKTKGQPREPQVYTLPPSREEMTKNQVSLTCLVKGFYPSDIAVEWESNGQPENNYKTTPPMLDSDGSFFLYSKLTVDKSRWQQGNVFSCSVMHEALHNHYTQKSLSLSPGK

SEQ ID NO: 727 - protein, 229 aa, artificial sequence
  IgG4 Fc
ESKYGPPCPSCPAPEFLGGPSVFLFPPKPKDTLMISRTPEVTCVVVDVSQEDPEVQFNWYVDGVEVHNAKTKPREEQFNSTYRVVSVLTVLHQDWLNGKEYKCKVSNKGLPSSIEKTISKAKGQPREPQVYTLPPSQEEMTKNQVSLTCLVKGFYPSDIAVEWESNGQPENNYKTTPPVLDSDGSFFLYSRLTVDKSRWQEGNVFSCSVMHEALHNHYTQKSLSLSLGK

SEQ ID NO: 728 - protein, 229 aa, artificial sequence
  IgG4 Fc S228P
ESKYGPPCPPCPAPEFLGGPSVFLFPPKPKDTLMISRTPEVTCVVVDVSQEDPEVQFNWYVDGVEVHNAKTKPREEQFNSTYRVVSVLTVLHQDWLNGKEYKCKVSNKGLPSSIEKTISKAKGQPREPQVYTLPPSQEEMTKNQVSLTCLVKGFYPSDIAVEWESNGQPENNYKTTPPVLDSDGSFFLYSRLTVDKSRWQEGNVFSCSVMHEALHNHYTQKSLSLSLGK

SEQ ID NO: 729 - protein, 231 aa, artificial sequence
  Fc K chain
EPKSSDKTHTCPPCPAPEAEGAPSVFLFPPKPKDTLMISRTPEVTCVVVDVSHEDPEVKFNWYVDGVEVHNAKTKPREEQYNSTYRVVSVLTVLHQDWLNGKEYKCKVSNKALPAPIEKTISKAKGQPREPQVYTLPPSRKKMTKNQVSLTCLVKGFYPSDIAVEWESNGQPENNYKTTPPVLKSDGSFFLYSKLTVDKSRWQQGNVFSCSVMHEALHNHYTQKSLSLSPG

SEQ ID NO: 730 - protein, 231 aa, artificial sequence
  Fc D chain
EPKSSDKTHTCPPCPAPEAEGAPSVFLFPPKPKDTLMISRTPEVTCVVVDVSHEDPEVKFNWYVDGVEVHNAKTKPREEQYNSTYRVVSVLTVLHQDWLNGKEYKCKVSNKALPAPIEKTISKAKGQPREPQVYTLPPSREEMTKNQVSLTCLVDGFYPSDIAVEWESNGQPENNYDTTPPVLDSDGSFFLYSDLTVDKSRWQQGNVFSCSVMHEALHNHYTQKSLSLSPG

SEQ ID NO: 731 - protein, 237 aa, artificial sequence
  Green Fluorescent protein
SKGEELFTGVVPILVELDGDVNGHKFSVSGEGEGDATYGKLTLKFICTTGKLPVPWPTLVTTFSYGVQCFSRYPDHMKQHDFFKSAMPEGYVQERTIFFKDDGNYKTRAEVKFEGDTLVNRIELKGIDFKEDGNILGHKLEYNYNSHNVYIMADKQKNGIKVNFKIRHNIEDGSVQLADHYQQNTPIGDGPVLLPDNHYLSTQSALSKDPNEKRDHMVLLEFVTAAGITHGMDELYK

SEQ ID NO: 732 - protein, 237 aa, artificial sequence
  eGFP
SKGEELFTGVVPILVELDGDVNGHKFSVSGEGEGDATYGKLTLKFICTTGKLPVPWPTLVTTLTYGVQCFSRYPDHMKQHDFFKSAMPEGYVQERTIFFKDDGNYKTRAEVKFEGDTLVNRIELKGIDFKEDGNILGHKLEYNYNSHNVYIMADKQKNGIKVNFKIRHNIEDGSVQLADHYQQNTPIGDGPVLLPDNHYLSTQSALSKDPNEKRDHMVLLEFVTAAGITHGMDELYK

SEQ ID NO: 733 - protein, 239 aa, artificial sequence
  eGFP
MVSKGEELFTGVVPILVELDGDVNGHKFSVSGEGEGDATYGKLTLKFICTTGKLPVPWPTLVTTLTYGVQCFSRYPDHMKQHDFFKSAMPEGYVQERTIFFKDDGNYKTRAEVKFEGDTLVNRIELKGIDFKEDGNILGHKLEYNYNSHNVYIMADKQKNGIKVNFKIRHNIEDGSVQLADHYQQNTPIGDGPVLLPDNHYLSTQSALSKDPNEKRDHMVLLEFVTAAGITLGMDELYK

SEQ ID NO: 734 - protein, 45 aa, artificial sequence
  Moiety: COMP
DLGPQMLRELQETNAALQDVRELLRQQVREITFLKNTVMECDACG

SEQ ID NO: 735 - protein, 33 aa, artificial sequence
  Moiety: VASP
DLQRVKQELLEEVKKELQKVKEEIIEAFVQELR

SEQ ID NO: 736 - protein, 40 aa, artificial sequence
  Moiety: ZZ12.6
DVQAISSTIQDLQDQVDSLAEVVLQNRRGLDLLTRSGGGS

SEQ ID NO: 737 - protein, 18 aa, artificial sequence
  HSA signal peptide
MKWVTFISLLFLFSSAYS

SEQ ID NO: 738 - protein, 22 aa, artificial sequence
  Ig kappa light chain
MDMRAPAGIFGFLLVLFPGYRS

SEQ ID NO: 739 - protein, 19 aa, artificial sequence
  human azurocidin preprotein signal sequence
MTRLTVLALLAGLLASSRA

SEQ ID NO: 740 - protein, 19 aa, artificial sequence
  IgG heavy chain signal peptide
MELGLSWIFLLAILKGVQC

SEQ ID NO: 741 - protein, 19 aa, artificial sequence
  IgG heavy chain signal peptide
MELGLRWVFLVAILEGVQC

SEQ ID NO: 742 - protein, 19 aa, artificial sequence
  IgG heavy chain signal peptide
MKHLWFFLLLVAAPRWVLS

SEQ ID NO: 743 - protein, 19 aa, artificial sequence
  IgG heavy chain signal peptide
MDWTWRILFLVAAATGAHS

SEQ ID NO: 744 - protein, 19 aa, artificial sequence
  IgG heavy chain signal peptide
MDWTWRFLFVVAAATGVQS

SEQ ID NO: 745 - protein, 19 aa, artificial sequence
  IgG heavy chain signal peptide
MEFGLSWLFLVAILKGVQC

SEQ ID NO: 746 - protein, 19 aa, artificial sequence
  IgG heavy chain signal peptide
MEFGLSWVFLVALFRGVQC

SEQ ID NO: 747 - protein, 26 aa, artificial sequence
  IgG heavy chain signal peptide
MDLLHKNMKHLWFFLLLVAAPRWVLS

SEQ ID NO: 748 - protein, 22 aa, artificial sequence
  IgG Kappa light chain signal sequence
MDMRVPAQLLGLLLLWLSGARC

SEQ ID NO: 749 - protein, 22 aa, artificial sequence
  IgG Kappa light chain signal sequence
MKYLLPTAAAGLLLLAAQPAMA

SEQ ID NO: 750 - protein, 17 aa, artificial sequence
  Gaussia luciferase
MGVKVLFALICIAVAEA

SEQ ID NO: 751 - protein, 18 aa, homo sapiens
  MISC_FEATURE: Human albumin
MKWVTFISLLFLFSSAYS

SEQ ID NO: 752 - protein, 18 aa, homo sapiens
  MISC_FEATURE: Human chymotrypsinogen
MAFLWLLSCWALLGTTFG

SEQ ID NO: 753 - protein, 14 aa, homo sapiens
  MISC_FEATURE: Human interleukin-2
MQLLSCIALILALV

SEQ ID NO: 754 - protein, 15 aa, homo sapiens
  MISC_FEATURE: Human trypsinogen-2
MNLLLILTFVAAAVA

SEQ ID NO: 755 - protein, 227 aa, artificial sequence
  Fc
DKPHTCPLCPAPELLGGPSVFLFPPKPKDTLMISRTPEVTCVVVDVSHEDPEVKFNWYVDGVEVHNAKTKPREEQYNSTYRVVSVLTVLHQDWLNGKEYKCKVSNKALPAPIEKTISKAKGQPREPQVYTLPPSRDELTKNQVSLTCLVKGFYPSDIAVEWESNGQPENNYKATPPVLDSDGSFFLYSKLTVDKSRWQQGNVFSCSVMHEALHNHYTQKSLSLSPGK

SEQ ID NO: 756 - protein, 232 aa, artificial sequence
  Fc
DPKSCDKPHTCPLCPAPELLGGPSVFLFPPKPKDTLMISRTPEVTCVVVDVSHEDPEVKFNWYVDGVEVHNAKTKPREEQYNSTYRVVSVLTVLHQDWLNGKEYKCKVSNKALPAPIEKTISKAKGQPREPQVYTLPPSRDELTKNQVSLTCLVKGFYPSDIAVEWESNGQPENNYKATPPVLDSDGSFFLYSKLTVDKSRWQQGNVFSCSVMHEALHNHYTQKSLSLSPGK

SEQ ID NO: 757 - protein, 227 aa, artificial sequence
  Fc variant
DKTHTCPPCPAPEAEGAPSVFLFPPKPKDTLMISRTPEVTCVVVDVSHEDPEVKFNWYVDGVEVHNAKTKPREEQYNSTYRVVSVLTVLHQDWLNGKEYKCKVSNKALPSSIEKTISKAKGQPREPQVYTLPPSRDELTKNQVSLTCLVKGFYPSDIAVEWESNGQPENNYKTTPPVLDSDGSFFLYSKLTVDKSRWQQGNVFSCSVMHEALHNHYTQKSLSLSPGK

SEQ ID NO: 758 - protein, 232 aa, artificial sequence
  Fc variant
EPKSSDKTHTCPPCPAPEAEGAPSVFLFPPKPKDTLMISRTPEVTCVVVDVSHEDPEVKFNWYVDGVEVHNAKTKPREEQYNSTYRVVSVLTVLHQDWLNGKEYKCKVSNKALPSSIEKTISKAKGQPREPQVYTLPPSRDELTKNQVSLTCLVKGFYPSDIAVEWESNGQPENNYKTTPPVLDSDGSFFLYSKLTVDKSRWQQGNVFSCSVMHEALHNHYTQKSLSLSPGK

SEQ ID NO: 759 - protein, 427 aa, artificial sequence
  variant multi domain immunomodulatory molecule
KAMHVAQPAVVLASSRGIASFVCEYASPGKATEVRVTVLRQADSQVTEVCAATYMMGNELTFLDDSICTGTSSGNQVNLTIQGLRAMDTGLYICKVELMYPPPYYLGIGNGTQIYVIDPEPCPDSDGSGGGGSEPKSSDKTHTCPPCPAPEAEGAPSVFLFPPKPKDTLMISRTPEVTCVVVDVSHEDPEVKFNWYVDGVEVHNAKTKPREEQYNSTYRVVSVLTVLHQDWLNGKEYKCKVSNKALPAPIEKTISKAKGQPREPQVYTLPPSRDELTKNQVSLTCLVKGFYPSDIAVEWESNGQPENNYKTTPPVLDSDGSFFLYSKLTVDKSRWQQGNVFSCSVMHEALHNHYTQKSLSLSPGGGGGSGGGGSGGGGSGGGGSSLSCRKEQGKFYDHLLRDCISCASICGQHPKQCAYFCENKLRS

SEQ ID NO: 760 - protein, 43 aa, artificial sequence
  variant TACI
SLSCRKEEGKFYDHLLRDCISCASICGQHPKQCAYFCENKLRS

SEQ ID NO: 761 - protein, 43 aa, artificial sequence
  variant TACI
SLSCRKEEGEFYDHLLRDCISCASICGQHPKQCAYFCENKLRS

SEQ ID NO: 762 - protein, 43 aa, artificial sequence
  variant TACI
SLSCRKEEGKYYDHLLRDCISCASICGQHPKQCAYFCENKLRS

SEQ ID NO: 763 - protein, 43 aa, artificial sequence
  variant TACI
SLSCRKEEGKFYDHLLRDCISCASICGQHPKQCDYFCENKLRS

SEQ ID NO: 764 - protein, 43 aa, artificial sequence
  variant TACI
SLSCRKEEGKFYDHLLRDCISCASICGQHPKQCADFCENKLRS

SEQ ID NO: 765 - protein, 43 aa, artificial sequence
  variant TACI
SLSCRKEQGEYYDHLLQDCISCASICGQHPKQCAYFCENKLRS

SEQ ID NO: 766 - protein, 43 aa, artificial sequence
  variant TACI
SLSCRKEQGKYYDHLLRDCISCASICGQHPKQCAYFCENKLRS

SEQ ID NO: 767 - protein, 43 aa, artificial sequence
  variant TACI
SLSCRKEQGKYYDHLLQDCISCASICGQHPKQCAYFCENKLRS

SEQ ID NO: 768 - protein, 43 aa, artificial sequence
  variant TACI
SLSCRKEQGKYYDHLLRDCISCASICGQHPKQCDYFCENKLRS

SEQ ID NO: 769 - protein, 43 aa, artificial sequence
  variant TACI
SLSCRKEQGKYYDHLLRDCISCASICGQHPKQCADFCENKLRS

SEQ ID NO: 770 - protein, 43 aa, artificial sequence
  variant TACI
SLSCRKEQGKFYDHLLQDCISCASICGQHPKQCDYFCENKLRS

SEQ ID NO: 771 - protein, 43 aa, artificial sequence
  variant TACI
SLSCRKEQGKFYDHLLQDCISCASICGQHPKQCADFCENKLRS

SEQ ID NO: 772 - protein, 43 aa, artificial sequence
  variant TACI
SLSCRKEQGKFYDHLLRDCISCASICGQHPKQCDDFCENKLRS

SEQ ID NO: 773 - protein, 460 aa, artificial sequence
  variant multi domain immunomodulatory molecule
KAMHVAQPAVVLASSRGIASFVCEYASPGKYTEVRVTVLRQADSQVTEVCAATYMMGNELTFLDDSICTGTSSGNQVNLTIQGLRAMDTGLYICKVELMYPPPYYEGIGNGTQIYVIDPEPCPDSDQGGGGSGGGGSEPKSSDKTHTCPPCPAPEAEGAPSVFLFPPKPKDTLMISRTPEVTCVVVDVSHEDPEVKFNWYVDGVEVHNAKTKPREEQYNSTYRVVSVLTVLHQDWLNGKEYKCKVSNKALPAPIEKTISKAKGQPREPQVYTLPPSRDELTKNQVSLTCLVKGFYPSDIAVEWESNGQPENNYKTTPPVLDSDGSFFLYSKLTVDKSRWQQGNVFSCSVMHEALHNHYTQKSLSLSPGGGGGSGGGGSVAMRSCPEEQYWDPLLGTCMSCKTICNHQSQRTCAAFCRSLSCRKEQGKFYDHLLRDCISCASICGQHPKQCAYFCENKLRS

SEQ ID NO: 774 - protein, 460 aa, artificial sequence
  variant multi domain immunomodulatory molecule
VAMRSCPEEQYWDPLLGTCMSCKTICNHQSQRTCAAFCRSLSCRKEQGKFYDHLLRDCISCASICGQHPKQCAYFCENKLRSGGGGSGGGGSEPKSSDKTHTCPPCPAPEAEGAPSVFLFPPKPKDTLMISRTPEVTCVVVDVSHEDPEVKFNWYVDGVEVHNAKTKPREEQYNSTYRVVSVLTVLHQDWLNGKEYKCKVSNKALPAPIEKTISKAKGQPREPQVYTLPPSRDELTKNQVSLTCLVKGFYPSDIAVEWESNGQPENNYKTTPPVLDSDGSFFLYSKLTVDKSRWQQGNVFSCSVMHEALHNHYTQKSLSLSPGGGGGSGGGGSKAMHVAQPAVVLASSRGIASFVCEYASPGKYTEVRVTVLRQADSQVTEVCAATYMMGNELTFLDDSICTGTSSGNQVNLTIQGLRAMDTGLYICKVELMYPPPYYEGIGNGTQIYVIDPEPCPDSDQ

SEQ ID NO: 775 - protein, 238 aa, artificial sequence
  variant multi domain immunomodulatory molecule
KAMHVAQPAVVLASSRGIASFVCEYASPGKYTEVRVTVLRQADSQVTEVCAATYMMGNELTFLDDSICTGTSSGNQVNLTIQGLRAMDTGLYICKVELMYPPPYYEGIGNGTQIYVIDPEPCPDSDQGGGGSGGGGSGGGGSVAMRSCPEEQYWDPLLGTCMSCKTICNHQSQRTCAAFCRSLSCRKEQGKFYDHLLRDCISCASICGQHPKQCAYFCENKLRSDYKDDDDKHHHHHH

SEQ ID NO: 776 - protein, 238 aa, artificial sequence
  variant multi domain immunomodulatory molecule
VAMRSCPEEQYWDPLLGTCMSCKTICNHQSQRTCAAFCRSLSCRKEQGKFYDHLLRDCISCASICGQHPKQCAYFCENKLRSGGGGSGGGGSGGGGSKAMHVAQPAVVLASSRGIASFVCEYASPGKYTEVRVTVLRQADSQVTEVCAATYMMGNELTFLDDSICTGTSSGNQVNLTIQGLRAMDTGLYICKVELMYPPPYYEGIGNGTQIYVIDPEPCPDSDQDYKDDDDKHHHHHH

SEQ ID NO: 777 - protein, 238 aa, artificial sequence
  variant multi domain immunomodulatory molecule
KAMHVAQPAVVLASSRGIASFVCEYASPGKYTEVRVTVLRQADSQVTEVCAATYMMGNELTFLDDSICTGTSSGNQVNLTIQGLRAMDTGLYICKVELMYPPPYYEGIGNGTQIYVIDPEPCPDSDQEAAAKEAAAKEAAAKVAMRSCPEEQYWDPLLGTCMSCKTICNHQSQRTCAAFCRSLSCRKEQGKFYDHLLRDCISCASICGQHPKQCAYFCENKLRSDYKDDDDKHHHHHH

SEQ ID NO: 778 - protein, 238 aa, artificial sequence
  variant multi domain immunomodulatory molecule
VAMRSCPEEQYWDPLLGTCMSCKTICNHQSQRTCAAFCRSLSCRKEQGKFYDHLLRDCISCASICGQHPKQCAYFCENKLRSEAAAKEAAAKEAAAKKAMHVAQPAVVLASSRGIASFVCEYASPGKYTEVRVTVLRQADSQVTEVCAATYMMGNELTFLDDSICTGTSSGNQVNLTIQGLRAMDTGLYICKVELMYPPPYYEGIGNGTQIYVIDPEPCPDSDQDYKDDDDKHHHHHH

SEQ ID NO: 779 - protein, 233 aa, artificial sequence
  variant multi domain immunomodulatory molecule
VAMRSCPEEQYWDPLLGTCMSCKTICNHQSQRTCAAFCRSLSCRKEQGKFYDHLLRDCISCASICGQHPKQCAYFCENKLRSEAAAKEAAAKKAMHVAQPAVVLASSRGIASFVCEYASPGKYTEVRVTVLRQADSQVTEVCAATYMMGNELTFLDDSICTGTSSGNQVNLTIQGLRAMDTGLYICKVELMYPPPYYEGIGNGTQIYVIDPEPCPDSDQDYKDDDDKHHHHHH

SEQ ID NO: 780 - protein, 460 aa, artificial sequence; identical to SEQ ID NO: 624
  variant multi domain immunomodulatory molecule

SEQ ID NO: 781 - protein, 456 aa, artificial sequence; identical to SEQ ID NO: 637
  variant multi domain immunomodulatory molecule

SEQ ID NO: 782 - protein, 456 aa, artificial sequence; identical to SEQ ID NO: 638
  variant multi domain immunomodulatory molecule

SEQ ID NO: 783 - protein, 43 aa, artificial sequence
  variant TACI
SLSCRKEQGKFYDHLLRDCISCASICGQHPKQCADFCENKLRS

SEQ ID NO: 784 - protein, 43 aa, artificial sequence
  variant TACI
SLSCRKEQGEYYDHLLRDCISCASICGQHPKQCAYFCENKLRS

SEQ ID NO: 785 - protein, 43 aa, artificial sequence
  variant TACI
SLSCRKEQGEFYDHLLRDCISCASICGQHPKQCADFCENKLRS

SEQ ID NO: 786 - protein, 418 aa, artificial sequence
  variant multi domain immunomodulatory molecule
KAMHVAQPAVVLASSRGIASFVCEYASPGKATEVRVTVLRQADSQVTEVCAATYMMGNELTFLDDSICTGTSSGNQVNLTIQGLRAMDTGLYICKVELMYPPPYYLGIGNGTQIYVIDPEPCPDSDGSGGGGSVECPPCPAPPVAGPSVFLFPPKPKDTLMISRTPEVTCVVVDVSHEDPEVQFNWYVDGVEVHNAKTKPREEQFNSTFRVVSVLTVVHQDWLNGKEYKCKVSNKGLPAPIEKTISKTKGQPREPQVYTLPPSREEMTKNQVSLTCLVKGFYPSDISVEWESNGQPENNYKTTPPMLDSDGSFFLYSKLTVDKSRWQQGNVFSCSVMHEALHNHYTQKSLSLSPGGGGGSGGGGSGGGGSGGGGSSLSCRKEQGKFYDHLLRDCISCASICGQHPKQCAYFCENKLRS

SEQ ID NO: 787 - protein, 424 aa, artificial sequence
  variant multi domain immunomodulatory molecule
KAMHVAQPAVVLASSRGIASFVCEYASPGKATEVRVTVLRQADSQVTEVCAATYMMGNELTFLDDSICTGTSSGNQVNLTIQGLRAMDTGLYICKVELMYPPPYYLGIGNGTQIYVIDPEPCPDSDGSGGGGSESKYGPPCPPCPAPEFLGGPSVFLFPPKPKDTLMISRTPEVTCVVVDVSQEDPEVQFNWYVDGVEVHNAKTKPREEQFNSTYRVVSVLTVLHQDWLNGKEYKCKVSNKGLPSSIEKTISKAKGQPREPQVYTLPPSQEEMTKNQVSLTCLVKGFYPSDIAVEWESNGQPENNYKTTPPVLDSDGSFFLYSRLTVDKSRWQEGNVFSCSVMHEALHNHYTQKSLSLSLGGGGGSGGGGSGGGGSGGGGSSLSCRKEQGKFYDHLLRDCISCASICGQHPKQCAYFCENKLRS

SEQ ID NO: 788 - protein, 427 aa, artificial sequence; identical to SEQ ID NO: 613
  variant multi domain immunomodulatory molecule

SEQ ID NO: 789 - protein, 418 aa, artificial sequence
  variant multi domain immunomodulatory molecule
KAMHVAQPAVVLASSRGIASFVCEYASPGKATEVRVTVLRQADSQVTEVCAATYMMGNELTFLDDSICTGTSSGNQVNLTIQGLRAMDTGLYICKVELMYPPPYYLGIGNGTQIYVIDPEPCPDSDGSGGGGSVECPPCPAPPVAGPSVFLFPPKPKDTLMISRTPEVTCVVVDVSHEDPEVQFNWYVDGVEVHNAKTKPREEQFNSTFRVVSVLTVVHQDWLNGKEYKCKVSNKGLPAPIEKTISKTKGQPREPQVYTLPPSREEMTKNQVSLTCLVKGFYPSDISVEWESNGQPENNYKTTPPMLDSDGSFFLYSKLTVDKSRWQQGNVFSCSVMHEALHNHYTQKSLSLSPGGGGGSGGGGSGGGGSGGGGSSLSCRKEEGKFYDHLLQDCISCASICGQHPKQCAYFCENKLRS

SEQ ID NO: 790 - protein, 424 aa, artificial sequence
  variant multi domain immunomodulatory molecule
KAMHVAQPAVVLASSRGIASFVCEYASPGKATEVRVTVLRQADSQVTEVCAATYMMGNELTFLDDSICTGTSSGNQVNLTIQGLRAMDTGLYICKVELMYPPPYYLGIGNGTQIYVIDPEPCPDSDGSGGGGSESKYGPPCPPCPAPEFLGGPSVFLFPPKPKDTLMISRTPEVTCVVVDVSQEDPEVQFNWYVDGVEVHNAKTKPREEQFNSTYRVVSVLTVLHQDWLNGKEYKCKVSNKGLPSSIEKTISKAKGQPREPQVYTLPPSQEEMTKNQVSLTCLVKGFYPSDIAVEWESNGQPENNYKTTPPVLDSDGSFFLYSRLTVDKSRWQEGNVFSCSVMHEALHNHYTQKSLSLSLGGGGGSGGGGSGGGGSGGGGSSLSCRKEEGKFYDHLLQDCISCASICGQHPKQCAYFCENKLRS

SEQ ID NO: 791 - protein, 422 aa, artificial sequence
  variant multi domain immunomodulatory molecule
KAMHVAQPAVVLASSRGIASFVCEYASPGKATEVRVTVLRQADSQVTEVCAATYMMGNELTFLDDSICTGTSSGNQVNLTIQGLRAMDTGLYICKVELMYPPPYYLGIGNGTQIYVIDPEPCPDSDGSGGGGSDKTHTCPPCPAPEAEGAPSVFLFPPKPKDTLMISRTPEVTCVVVDVSHEDPEVKFNWYVDGVEVHNAKTKPREEQYNSTYRVVSVLTVLHQDWLNGKEYKCKVSNKALPAPIEKTISKAKGQPREPQVYTLPPSRDELTKNQVSLTCLVKGFYPSDIAVEWESNGQPENNYKTTPPVLDSDGSFFLYSKLTVDKSRWQQGNVFSCSVMHEALHNHYTQKSLSLSPGGGGGSGGGGSGGGGSGGGGSSLSCRKEQGKFYDHLLRDCISCASICGQHPKQCAYFCENKLRS

SEQ ID NO: 792 - protein, 422 aa, artificial sequence
  variant multi domain immunomodulatory molecule
KAMHVAQPAVVLASSRGIASFVCEYASPGKATEVRVTVLRQADSQVTEVCAATYMMGNELTFLDDSICTGTSSGNQVNLTIQGLRAMDTGLYICKVELMYPPPYYLGIGNGTQIYVIDPEPCPDSDGSGGGGSDKTHTCPPCPAPEAEGAPSVFLFPPKPKDTLMISRTPEVTCVVVDVSHEDPEVKFNWYVDGVEVHNAKTKPREEQYNSTYRVVSVLTVLHQDWLNGKEYKCKVSNKALPAPIEKTISKAKGQPREPQVYTLPPSRDELTKNQVSLTCLVKGFYPSDIAVEWESNGQPENNYKTTPPVLDSDGSFFLYSKLTVDKSRWQQGNVFSCSVMHEALHNHYTQKSLSLSPGGGGGSGGGGSGGGGSGGGGSSLSCRKEEGKFYDHLLQDCISCASICGQHPKQCAYFCENKLRS

SEQ ID NO: 793 - DNA, 1281 bp, artificial sequence
  variant multi domain immunomodulatory molecule
aaagcgatgcacgtcgcccagcctgctgtcgtactcgccagctcacgcggcatcgcaagtttcgtatgcgaatatgcctctccatggaaagcgaccgaggtcagagttactgtactgagacaagctgattcacaagtgactgaggtctgcgctgctacttatatgatggggaacgagctgactttccttgatgactcaatctgtaccggcaccagcagtgggaaccaagtaaatcttactattcaaggactgagggcaatggacacgggactttacatttgtaaggtcgagcagatgtacccgccaccttacctcctcggaatcggtaatggtacgcaaatttatgttatagatcctgaaccgtgccccgattccgacggatccggtggaggagggtcagagcccaaaagctccgacaagactcacacatgccccccttgtccagcgcctgaagctgagggtgcgccctctgtcttccttttcccccctaagccgaaagataccctgatgatctcccgcactcccgaagtcacatgtgttgttgtcgacgtatctcatgaagatcctgaggtgaaattcaactggtatgtagacggggtcgaagttcataatgctaagactaagccacgagaagagcaatacaactcaacgtatcgggtggtgagcgttctgacggttctgcaccaagattggcttaatggaaaagagtataagtgcaaggtgtccaacaaggctcttccggcacccatcgaaaagacgatttccaaagcgaaaggccaacctagggaaccgcaagtttacactttgcccccgtcaagagacgaacttaccaagaatcaagtttccctgacgtgccttgtgaagggcttctaccctagcgatatagcagttgagtgggaatctaacggccagcccgaaaataattataagactactccgcccgtgctggacagtgatggttcatttttcctgtattcaaaactcactgtggacaaatctagatggcagcagggtaatgtgttctcttgttcagttatgcacgaggcattgcacaatcactatacgcaaaaaagtttgtctctctctccgggggggggtggcggatcaggaggtggcggttcaggcggaggaggttctgggggtgggggttctagtctctcttgcaggaaagagcaaggcgaatattacgaccatcttttgcgagactgtataagctgtgcgtctatttgtggacaacaccctaaacaatgtgctgatttctgtgaaaataagcttcgatct

SEQ ID NO: 794 - DNA, 1281 bp, artificial sequence
  variant multi domain immunomodulatory molecule
aaagcgatgcacgtcgcccagcctgctgtcgtactcgccagctcacgcggcatcgcaagtttcgtatgcgaatatgcctctccatggaaagcgaccgaggtcagagttactgtactgagacaagctgattcacaagtgactgaggtctgcgctgctacttatatgatggggaacgagctgactttccttgatgactcaatctgtaccggcaccagcagtgggaaccaagtaaatcttactattcaaggactgagggcaatggacacgggactttacatttgtaaggtcgagcagatgtacccgccaccttacctcctcggaatcggtaatggtacgcaaatttatgttatagatcctgaaccgtgccccgattccgacggatccggtggaggagggtcagagcccaaaagctccgacaagactcacacatgccccccttgtccagcgcctgaagctgagggtgcgccctctgtcttccttttcccccctaagccgaaagataccctgatgatctcccgcactcccgaagtcacatgtgttgttgtcgacgtatctcatgaagatcctgaggtgaaattcaactggtatgtagacggggtcgaagttcataatgctaagactaagccacgagaagagcaatacaactcaacgtatcgggtggtgagcgttctgacggttctgcaccaagattggcttaatggaaaagagtataagtgcaaggtgtccaacaaggctcttccggcacccatcgaaaagacgatttccaaagcgaaaggccaacctagggaaccgcaagtttacactttgcccccgtcaagagacgaacttaccaagaatcaagtttccctgacgtgccttgtgaagggcttctaccctagcgatatagcagttgagtgggaatctaacggccagcccgaaaataattataagactactccgcccgtgctggacagtgatggttcatttttcctgtattcaaaactcactgtggacaaatctagatggcagcagggtaatgtgttctcttgttcagttatgcacgaggcattgcacaatcactatacgcaaaaaagtttgtctctctctccgggggggggtggcggatcaggaggtggcggttcaggcggaggaggttctgggggtgggggttctagtctctcttgcaggaaagaggaaggcaaattttacgaccatcttttgcaagactgtataagctgtgcgtctatttgtggacaacaccctaaacaatgtgcttatttctgtgaaaataagcttcgatct

SEQ ID NO: 795 - DNA, 1281 bp, artificial sequence
  variant multi domain immunomodulatory molecule
aaagcgatgcacgtcgcccagcctgctgtcgtactcgctagctcacgcggcatcgcaagtttcgtatgcgaatatgcctctccaggaaaagcgaccgaggtcagagttactgtactgagacaagctgattcacaagtgactgaggtctgcgctgctacttatatgatggggaacgagctgactttccttgatgactcaatctgtaccggcaccagcagtgggaaccaagtaaatcttactattcaaggactgagggcaatggacacgggactttacatttgtaaggtcgagctgatgtacccgccaccttactacctcggaatcggtaatggtacgcaaatttatgttatagatcctgaaccgtgccccgattccgacggatccggtggaggagggtcagagcccaaaagctccgacaagactcacacatgccccccttgtccagcgcctgaagctgagggtgcgccctctgtcttccttttcccccctaagccgaaagataccctgatgatctcccgcactcccgaagtcacatgtgttgttgtcgacgtatctcatgaagatcctgaggtgaaattcaactggtatgtagacggggtcgaagttcataatgctaagactaagccacgagaagagcaatacaactcaacgtatcgggtggtgagcgttctgacggttctgcaccaagattggcttaatggaaaagagtataagtgcaaggtgtccaacaaggctcttccggcacccatcgaaaagacgatttccaaagcgaaaggccaacctagggaaccgcaagtttacactttgcccccgtcaagagacgaacttaccaagaatcaagtttccctgacgtgccttgtgaagggcttctaccctagcgatatagcagttgagtgggaatctaacggccagcccgaaaataattataagactactccgcccgtgctggacagtgatggttcatttttcctgtattcaaaactcactgtggacaaatctagatggcagcagggtaatgtgttctcttgttcagttatgcacgaggcattgcacaatcactatacgcaaaaaagtttgtctctctctccgggggggggtggcggatcaggaggtggcggttcaggcggaggaggttctgggggtgggggttctagtctctcttgcaggaaagagcaaggcgaatattacgaccatcttttgcgagactgtataagctgtgcgtctatttgtggacaacaccctaaacaatgtgctgatttctgtgaaaataagcttcgatct

SEQ ID NO: 796 - DNA, 1281 bp, artificial sequence
  variant multi domain immunomodulatory molecule
aaagcgatgcacgtcgcccagcctgctgtcgtactcgctagctcacgcggcatcgcaagtttcgtatgcgaatatgcctctccaggaaaagcgaccgaggtcagagttactgtactgagacaagctgattcacaagtgactgaggtctgcgctgctacttatatgatggggaacgagctgactttccttgatgactcaatctgtaccggcaccagcagtgggaaccaagtaaatcttactattcaaggactgagggcaatggacacgggactttacatttgtaaggtcgagctgatgtacccgccaccttactacctcggaatcggtaatggtacgcaaatttatgttatagatcctgaaccgtgccccgattccgacggatccggtggaggagggtcagagcccaaaagctccgacaagactcacacatgccccccttgtccagcgcctgaagctgagggtgcgccctctgtcttccttttcccccctaagccgaaagataccctgatgatctcccgcactcccgaagtcacatgtgttgttgtcgacgtatctcatgaagatcctgaggtgaaattcaactggtatgtagacggggtcgaagttcataatgctaagactaagccacgagaagagcaatacaactcaacgtatcgggtggtgagcgttctgacggttctgcaccaagattggcttaatggaaaagagtataagtgcaaggtgtccaacaaggctcttccggcacccatcgaaaagacgatttccaaagcgaaaggccaacctagggaaccgcaagtttacactttgcccccgtcaagagacgaacttaccaagaatcaagtttccctgacgtgccttgtgaagggcttctaccctagcgatatagcagttgagtgggaatctaacggccagcccgaaaataattataagactactccgcccgtgctggacagtgatggttcatttttcctgtattcaaaactcactgtggacaaatctagatggcagcagggtaatgtgttctcttgttcagttatgcacgaggcattgcacaatcactatacgcaaaaaagtttgtctctctctccgggggggggtggcggatcaggaggtggcggttcaggcggaggaggttctgggggtgggggttctagtctctcttgcaggaaagagcaaggcaaattttacgaccatcttttgcgagactgtataagctgtgcgtctatttgtggacaacaccctaaacaatgtgcttatttctgtgaaaataagcttcgatct

SEQ ID NO: 797 - DNA, 1254 bp, artificial sequence
  variant multi domain immunomodulatory molecule
aaagcgatgcacgtcgcccagcctgctgtcgtactcgctagctcacgcggcatcgcaagtttcgtatgcgaatatgcctctccaggaaaagcgaccgaggtcagagttactgtactgagacaagctgattcacaagtgactgaggtctgcgctgctacttatatgatggggaacgagctgactttccttgatgactcaatctgtaccggcaccagcagtgggaaccaagtaaatcttactattcaaggactgagggcaatggacacgggactttacatttgtaaggtcgagctgatgtacccgccaccttactacctcggaatcggtaatggtacgcaaatttatgttatagatcctgaaccgtgccccgattccgacggatccggtggaggagggtcagtggaatgccctccttgtcctgctcctccagtggctggcccttccgtgtttctgttccctccaaagcctaaggacaccctgatgatcagcagaacccctgaagtgacctgcgtggtggtggatgtgtctcacgaagatcccgaggtgcagttcaattggtacgtggacggcgtggaagtgcacaacgccaagaccaagcctagagaggaacagttcaacagcaccttcagagtggtgtccgtgctgaccgtggtgcatcaggattggctgaacggcaaagagtacaagtgcaaggtgtccaacaagggcctgcctgctcctatcgagaaaaccatctctaagaccaaggggcagccccgcgaacctcaggtttacacactgcctccaagccgggaagagatgaccaagaaccaggtgtccctgacctgcctcgtgaagggcttttaccccagcgacattagcgtggaatgggagagcaatggccagcctgagaacaactacaagaccacacctcctatgctggacagcgacggctcattcttcctgtacagcaagctgacagtggacaagtccagatggcagcagggcaacgtgttcagctgcagcgtgatgcacgaggccctgcacaaccactacacccagaagtccctgagcctgtctcctggcgggggtggcggatcaggaggtggcggttcaggcggaggaggttctgggggtgggggttctagtctctcttgcaggaaagagcaaggcaaattttacgaccatcttttgcgagactgtataagctgtgcgtctatttgtggacaacaccctaaacaatgtgcttatttctgtgaaaataagcttcgatct

SEQ ID NO: 798 - DNA, 1272 bp, artificial sequence
  variant multi domain immunomodulatory molecule
aaagcgatgcacgtcgcccagcctgctgtcgtactcgctagctcacgcggcatcgcaagtttcgtatgcgaatatgcctctccaggaaaagcgaccgaggtcagagttactgtactgagacaagctgattcacaagtgactgaggtctgcgctgctacttatatgatggggaacgagctgactttccttgatgactcaatctgtaccggcaccagcagtgggaaccaagtaaatcttactattcaaggactgagggcaatggacacgggactttacatttgtaaggtcgagctgatgtacccgccaccttactacctcggaatcggtaatggtacgcaaatttatgttatagatcctgaaccgtgccccgattccgacggatccggtggaggagggtcagagtccaaatatggtcccccatgcccaccatgcccagcacctgagttcctggggggaccatcagtcttcctgttccccccaaaacccaaggacactctcatgatctcccggacccctgaggtcacgtgcgtggtggtggacgtgagccaggaagaccccgaggtccagttcaactggtacgtggatggcgtggaggtgcataatgccaagacaaagccgcgggaggagcagttcaacagcacgtaccgtgtggtcagcgtcctcaccgtcctgcaccaggactggctgaacggcaaggagtacaagtgcaaggtctccaacaaaggcctcccgtcctccatcgagaaaaccatctccaaagccaaagggcagccccgagagccacaggtgtacaccctgcccccatcccaggaggagatgaccaagaaccaggtcagcctgacctgcctggtcaaaggcttctaccccagcgacatcgccgtggagtgggagagcaatgggcagccggagaacaactacaagaccacgcctcccgtgctggactccgacggctccttcttcctctacagcaggctaaccgtggacaagagcaggtggcaggaggggaatgtcttctcatgctccgtgatgcatgaggctctgcacaaccactacacacagaagagcctctccctgtctctgggtgggggtggcggatcaggaggtggcggttcaggcggaggaggttctgggggtgggggttctagtctctcttgcaggaaagagcaaggcaaattttacgaccatcttttgcgagactgtataagctgtgcgtctatttgtggacaacaccctaaacaatgtgcttatttctgtgaaaataagcttcgatct

SEQ ID NO: 799 - DNA, 1281 bp, artificial sequence
  variant multi domain immunomodulatory molecule
aaagcgatgcacgtcgcccagcctgctgtcgtactcgctagctcacgcggcatcgcaagtttcgtatgcgaatatgcctctccaggaaaagcgaccgaggtcagagttactgtactgagacaagctgattcacaagtgactgaggtctgcgctgctacttatatgatggggaacgagctgactttccttgatgactcaatctgtaccggcaccagcagtgggaaccaagtaaatcttactattcaaggactgagggcaatggacacgggactttacatttgtaaggtcgagctgatgtacccgccaccttactacctcggaatcggtaatggtacgcaaatttatgttatagatcctgaaccgtgccccgattccgacggatccggtggaggagggtcagagcccaaaagctccgacaagactcacacatgccccccttgtccagcgcctgaagctgagggtgcgccctctgtcttccttttcccccctaagccgaaagataccctgatgatctcccgcactcccgaagtcacatgtgttgttgtcgacgtatctcatgaagatcctgaggtgaaattcaactggtatgtagacggggtcgaagttcataatgctaagactaagccacgagaagagcaatacaactcaacgtatcgggtggtgagcgttctgacggttctgcaccaagattggcttaatggaaaagagtataagtgcaaggtgtccaacaaggctcttccggcacccatcgaaaagacgatttccaaagcgaaaggccaacctagggaaccgcaagtttacactttgcccccgtcaagagacgaacttaccaagaatcaagtttccctgacgtgccttgtgaagggcttctaccctagcgatatagcagttgagtgggaatctaacggccagcccgaaaataattataagactactccgcccgtgctggacagtgatggttcatttttcctgtattcaaaactcactgtggacaaatctagatggcagcagggtaatgtgttctcttgttcagttatgcacgaggcattgcacaatcactatacgcaaaaaagtttgtctctctctccgggggggggtggcggatcaggaggtggcggttcaggcggaggaggttctgggggtgggggttctagtctctcttgcaggaaagaggaaggcaaattttacgaccatcttttgcaagactgtataagctgtgcgtctatttgtggacaacaccctaaacaatgtgcttatttctgtgaaaataagcttcgatct

SEQ ID NO: 800 - DNA, 1254 bp, artificial sequence
  variant multi domain immunomodulatory molecule
aaagcgatgcacgtcgcccagcctgctgtcgtactcgctagctcacgcggcatcgcaagtttcgtatgcgaatatgcctctccaggaaaagcgaccgaggtcagagttactgtactgagacaagctgattcacaagtgactgaggtctgcgctgctacttatatgatggggaacgagctgactttccttgatgactcaatctgtaccggcaccagcagtgggaaccaagtaaatcttactattcaaggactgagggcaatggacacgggactttacatttgtaaggtcgagctgatgtacccgccaccttactacctcggaatcggtaatggtacgcaaatttatgttatagatcctgaaccgtgccccgattccgacggatccggtggaggagggtcagtggaatgccctccttgtcctgctcctccagtggctggcccttccgtgtttctgttccctccaaagcctaaggacaccctgatgatcagcagaacccctgaagtgacctgcgtggtggtggatgtgtctcacgaagatcccgaggtgcagttcaattggtacgtggacggcgtggaagtgcacaacgccaagaccaagcctagagaggaacagttcaacagcaccttcagagtggtgtccgtgctgaccgtggtgcatcaggattggctgaacggcaaagagtacaagtgcaaggtgtccaacaagggcctgcctgctcctatcgagaaaaccatctctaagaccaaggggcagccccgcgaacctcaggtttacacactgcctccaagccgggaagagatgaccaagaaccaggtgtccctgacctgcctcgtgaagggcttttaccccagcgacattagcgtggaatgggagagcaatggccagcctgagaacaactacaagaccacacctcctatgctggacagcgacggctcattcttcctgtacagcaagctgacagtggacaagtccagatggcagcagggcaacgtgttcagctgcagcgtgatgcacgaggccctgcacaaccactacacccagaagtccctgagcctgtctcctggcgggggtggcggatcaggaggtggcggttcaggcggaggaggttctgggggtgggggttctagtctctcttgcaggaaagaggaaggcaaattttacgaccatcttttgcaagactgtataagctgtgcgtctatttgtggacaacaccctaaacaatgtgcttatttctgtgaaaataagcttcgatct

SEQ ID NO: 801 - DNA, 1272 bp, artificial sequence
  variant multi domain immunomodulatory molecule
aaagcgatgcacgtcgcccagcctgctgtcgtactcgctagctcacgcggcatcgcaagtttcgtatgcgaatatgcctctccaggaaaagcgaccgaggtcagagttactgtactgagacaagctgattcacaagtgactgaggtctgcgctgctacttatatgatggggaacgagctgactttccttgatgactcaatctgtaccggcaccagcagtgggaaccaagtaaatcttactattcaaggactgagggcaatggacacgggactttacatttgtaaggtcgagctgatgtacccgccaccttactacctcggaatcggtaatggtacgcaaatttatgttatagatcctgaaccgtgccccgattccgacggatccggtggaggagggtcagagtccaaatatggtcccccatgcccaccatgcccagcacctgagttcctggggggaccatcagtcttcctgttccccccaaaacccaaggacactctcatgatctcccggacccctgaggtcacgtgcgtggtggtggacgtgagccaggaagaccccgaggtccagttcaactggtacgtggatggcgtggaggtgcataatgccaagacaaagccgcgggaggagcagttcaacagcacgtaccgtgtggtcagcgtcctcaccgtcctgcaccaggactggctgaacggcaaggagtacaagtgcaaggtctccaacaaaggcctcccgtcctccatcgagaaaaccatctccaaagccaaagggcagccccgagagccacaggtgtacaccctgcccccatcccaggaggagatgaccaagaaccaggtcagcctgacctgcctggtcaaaggcttctaccccagcgacatcgccgtggagtgggagagcaatgggcagccggagaacaactacaagaccacgcctcccgtgctggactccgacggctccttcttcctctacagcaggctaaccgtggacaagagcaggtggcaggaggggaatgtcttctcatgctccgtgatgcatgaggctctgcacaaccactacacacagaagagcctctccctgtctctgggtgggggtggcggatcaggaggtggcggttcaggcggaggaggttctgggggtgggggttctagtctctcttgcaggaaagaggaaggcaaattttacgaccatcttttgcaagactgtataagctgtgcgtctatttgtggacaacaccctaaacaatgtgcttatttctgtgaaaataagcttcgatct

SEQ ID NO: 802 - DNA, 1266 bp, artificial sequence
  variant multi domain immunomodulatory molecule
aaagcgatgcacgtcgcccagcctgctgtcgtactcgctagctcacgcggcatcgcaagtttcgtatgcgaatatgcctctccaggaaaagcgaccgaggtcagagttactgtactgagacaagctgattcacaagtgactgaggtctgcgctgctacttatatgatggggaacgagctgactttccttgatgactcaatctgtaccggcaccagcagtgggaaccaagtaaatcttactattcaaggactgagggcaatggacacgggactttacatttgtaaggtcgagctgatgtacccgccaccttactacctcggaatcggtaatggtacgcaaatttatgttatagatcctgaaccgtgccccgattccgacggatccggtggaggagggtcagacaagactcacacatgccccccttgtccagcgcctgaagctgagggtgcgccctctgtcttccttttcccccctaagccgaaagataccctgatgatctcccgcactcccgaagtcacatgtgttgttgtcgacgtatctcatgaagatcctgaggtgaaattcaactggtatgtagacggggtcgaagttcataatgctaagactaagccacgagaagagcaatacaactcaacgtatcgggtggtgagcgttctgacggttctgcaccaagattggcttaatggaaaagagtataagtgcaaggtgtccaacaaggctcttccggcacccatcgaaaagacgatttccaaagcgaaaggccaacctagggaaccgcaagtttacactttgcccccgtcaagagacgaacttaccaagaatcaagtttccctgacgtgccttgtgaagggcttctaccctagcgatatagcagttgagtgggaatctaacggccagcccgaaaataattataagactactccgcccgtgctggacagtgatggttcatttttcctgtattcaaaactcactgtggacaaatctagatggcagcagggtaatgtgttctcttgttcagttatgcacgaggcattgcacaatcactatacgcaaaaaagtttgtctctctctccgggggggggtggcggatcaggaggtggcggttcaggcggaggaggttctgggggtgggggttctagtctctcttgcaggaaagagcaaggcaaattttacgaccatcttttgcgagactgtataagctgtgcgtctatttgtggacaacaccctaaacaatgtgcttatttctgtgaaaataagcttcgatct

SEQ ID NO: 803 - DNA, 1266 bp, artificial sequence
  variant multi domain immunomodulatory molecule
aaagcgatgcacgtcgcccagcctgctgtcgtactcgctagctcacgcggcatcgcaagtttcgtatgcgaatatgcctctccaggaaaagcgaccgaggtcagagttactgtactgagacaagctgattcacaagtgactgaggtctgcgctgctacttatatgatggggaacgagctgactttccttgatgactcaatctgtaccggcaccagcagtgggaaccaagtaaatcttactattcaaggactgagggcaatggacacgggactttacatttgtaaggtcgagctgatgtacccgccaccttactacctcggaatcggtaatggtacgcaaatttatgttatagatcctgaaccgtgccccgattccgacggatccggtggaggagggtcagacaagactcacacatgccccccttgtccagcgcctgaagctgagggtgcgccctctgtcttccttttcccccctaagccgaaagataccctgatgatctcccgcactcccgaagtcacatgtgttgttgtcgacgtatctcatgaagatcctgaggtgaaattcaactggtatgtagacggggtcgaagttcataatgctaagactaagccacgagaagagcaatacaactcaacgtatcgggtggtgagcgttctgacggttctgcaccaagattggcttaatggaaaagagtataagtgcaaggtgtccaacaaggctcttccggcacccatcgaaaagacgatttccaaagcgaaaggccaacctagggaaccgcaagtttacactttgcccccgtcaagagacgaacttaccaagaatcaagtttccctgacgtgccttgtgaagggcttctaccctagcgatatagcagttgagtgggaatctaacggccagcccgaaaataattataagactactccgcccgtgctggacagtgatggttcatttttcctgtattcaaaactcactgtggacaaatctagatggcagcagggtaatgtgttctcttgttcagttatgcacgaggcattgcacaatcactatacgcaaaaaagtttgtctctctctccgggggggggtggcggatcaggaggtggcggttcaggcggaggaggttctgggggtgggggttctagtctctcttgcaggaaagaggaaggcaaattttacgaccatcttttgcaagactgtataagctgtgcgtctatttgtggacaacaccctaaacaatgtgcttatttctgtgaaaataagcttcgatct

SEQ ID NO: 804 - protein, 227 aa, artificial sequence; identical to SEQ ID NO: 755
  variant Fc

SEQ ID NO: 805 - protein, 12 aa, artificial sequence
  linker
GSGGGGSGGGGS

SEQ ID NO: 806 - protein, 65 aa, artificial sequence
  linker
GGGGSGGGGSGGGGSGGGGSGGGGSGGGGSGGGGSGGGGSGGGGSGGGGSGGGGSGGGGSGGGGS

SEQ ID NO: 807 - protein, 587 aa, artificial sequence
  variant BCMA Fc
LQMAGQCSQNEYFDSLLHACIPCQLRCSSNTPPLTCQRYCNASVTNSVKGTNAGSGGGGSGGGGSEPKSSDKTHTCPPCPAPEAEGAPSVFLFPPKPKDTLMISRTPEVTCVVVDVSHEDPEVKFNWYVDGVEVHNAKTKPREEQYNSTYRVVSVLTVLHQDWLNGKEYKCKVSNKALPAPIEKTISKAKGQPREPQVYTLPPSRDELTKNQVSLTCLVKGFYPSDIAVEWESNGQPENNYKTTPPVLDSDGSFFLYSKLTVDKSRWQQGNVFSCSVMHEALHNHYTQKSLSLSPGGGGGSGGGGSGGGGSGGGGSGGGGSGGGGSGGGGSGGGGSGGGGSGGGGSGGGGSGGGGSEPKSSDKTHTCPPCPAPEAEGAPSVFLFPPKPKDTLMISRTPEVTCVVVDVSHEDPEVKFNWYVDGVEVHNAKTKPREEQYNSTYRVVSVLTVLHQDWLNGKEYKCKVSNKALPAPIEKTISKAKGQPREPQVYTLPPSRDELTKNQVSLTCLVKGFYPSDIAVEWESNGQPENNYKTTPPVLDSDGSFFLYSKLTVDKSRWQQGNVFSCSVMHEALHNHYTQKSLSLSPG

SEQ ID NO: 808 - protein, 291 aa, artificial sequence
  variant BCMA Fc
LQMAGQCSQNEYFDSLLHACIPCQLRCSSNTPPLTCQRYCNASVTNSVKGTNAGSGGGGSEPKSSDKTHTCPPCPAPEAEGAPSVFLFPPKPKDTLMISRTPEVTCVVVDVSHEDPEVKFNWYVDGVEVHNAKTKPREEQYNSTYRVVSVLTVLHQDWLNGKEYKCKVSNKALPAPIEKTISKAKGQPREPQVYTLPPSRDELTKNQVSLTCLVKGFYPSDIAVEWESNGQPENNYKTTPPVLDSDGSFFLYSKLTVDKSRWQQGNVFSCSVMHEALHNHYTQKSLSLSPG

SEQ ID NO: 809 - protein, 359 aa, artificial sequence
  variant BCMA Fc
LQMAGQCSQNEYFDSLLHACIPCQLRCSSNTPPLTCQRYCNASVTNSVKGTNAGSGGGGSEPKSSDKTHTCPPCPAPEAEGAPSVFLFPPKPKDTLMISRTPEVTCVVVDVSHEDPEVKFNWYVDGVEVHNAKTKPREEQYNSTYRVVSVLTVLHQDWLNGKEYKCKVSNKALPAPIEKTISKAKGQPREPQVYTLPPSRDELTKNQVSLTCLVKGFYPSDIAVEWESNGQPENNYKTTPPVLDSDGSFFLYSKLTVDKSRWQQGNVFSCSVMHEALHNHYTQKSLSLSPGGGGGSGGGGSGGGGSLQMAGQCSQNEYFDSLLHACIPCQLRCSSNTPPLTCQRYCNASVTNSVKGTNA

SEQ ID NO: 810 - protein, 587 aa, artificial sequence
  variant BCMA Fc
LQMAGQCSQNEYFDSLLLACIPCQLRCSSNTPPLTCQRYCNASVTNSVKGTNAGSGGGGSGGGGSEPKSSDKTHTCPPCPAPEAEGAPSVFLFPPKPKDTLMISRTPEVTCVVVDVSHEDPEVKFNWYVDGVEVHNAKTKPREEQYNSTYRVVSVLTVLHQDWLNGKEYKCKVSNKALPAPIEKTISKAKGQPREPQVYTLPPSRDELTKNQVSLTCLVKGFYPSDIAVEWESNGQPENNYKTTPPVLDSDGSFFLYSKLTVDKSRWQQGNVFSCSVMHEALHNHYTQKSLSLSPGGGGGSGGGGSGGGGSGGGGSGGGGSGGGGSGGGGSGGGGSGGGGSGGGGSGGGGSGGGGSEPKSSDKTHTCPPCPAPEAEGAPSVFLFPPKPKDTLMISRTPEVTCVVVDVSHEDPEVKFNWYVDGVEVHNAKTKPREEQYNSTYRVVSVLTVLHQDWLNGKEYKCKVSNKALPAPIEKTISKAKGQPREPQVYTLPPSRDELTKNQVSLTCLVKGFYPSDIAVEWESNGQPENNYKTTPPVLDSDGSFFLYSKLTVDKSRWQQGNVFSCSVMHEALHNHYTQKSLSLSPG

SEQ ID NO: 811 - protein, 291 aa, artificial sequence
  variant BCMA Fc
LQMAGQCSQNEYFDSLLLACIPCQLRCSSNTPPLTCQRYCNASVTNSVKGTNAGSGGGGSEPKSSDKTHTCPPCPAPEAEGAPSVFLFPPKPKDTLMISRTPEVTCVVVDVSHEDPEVKFNWYVDGVEVHNAKTKPREEQYNSTYRVVSVLTVLHQDWLNGKEYKCKVSNKALPAPIEKTISKAKGQPREPQVYTLPPSRDELTKNQVSLTCLVKGFYPSDIAVEWESNGQPENNYKTTPPVLDSDGSFFLYSKLTVDKSRWQQGNVFSCSVMHEALHNHYTQKSLSLSPG

SEQ ID NO: 812 - protein, 359 aa, artificial sequence
  variant BCMA Fc
LQMAGQCSQNEYFDSLLLACIPCQLRCSSNTPPLTCQRYCNASVTNSVKGTNAGSGGGGSEPKSSDKTHTCPPCPAPEAEGAPSVFLFPPKPKDTLMISRTPEVTCVVVDVSHEDPEVKFNWYVDGVEVHNAKTKPREEQYNSTYRVVSVLTVLHQDWLNGKEYKCKVSNKALPAPIEKTISKAKGQPREPQVYTLPPSRDELTKNQVSLTCLVKGFYPSDIAVEWESNGQPENNYKTTPPVLDSDGSFFLYSKLTVDKSRWQQGNVFSCSVMHEALHNHYTQKSLSLSPGGGGGSGGGGSGGGGSLQMAGQCSQNEYFDALLYACIPCQLRCSSNTPPLTCQQYCNASVTNSVKGTNA

SEQ ID NO: 813 - protein, 359 aa, artificial sequence
  variant BCMA Fc
LQMAGQCSQNEYFDSLLLACIPCQLRCSSNTPPLTCQRYCNASVTNSVKGTNAGGGGSGGGGSGGGGSLQMAGQCSQNEYFDSLLLACIPCQLRCSSNTPPLTCQRYCNASVTNSVKGTNAGSGGGGSEPKSSDKTHTCPPCPAPEAEGAPSVFLFPPKPKDTLMISRTPEVTCVVVDVSHEDPEVKFNWYVDGVEVHNAKTKPREEQYNSTYRVVSVLTVLHQDWLNGKEYKCKVSNKALPAPIEKTISKAKGQPREPQVYTLPPSRDELTKNQVSLTCLVKGFYPSDIAVEWESNGQPENNYKTTPPVLDSDGSFFLYSKLTVDKSRWQQGNVFSCSVMHEALHNHYTQKSLSLSPG

SEQ ID NO: 814 - DNA, 1761 bp, artificial sequence
  variant BCMA Fc
ctgcaaatggccgggcagtgcagccagaacgaatactttgactccttgttgcacgcatgtattccttgccaactgcgctgttcaagcaacacccccccgctcacgtgtcagcggtactgcaacgcatctgttaccaacagtgtcaaagggactaatgcgggatccggtggtggcgggtcagggggaggtggaagcgagcccaagtcctcagataagactcatacttgccccccctgtcccgcccctgaggccgaaggcgcaccgtcagtgtttttgttcccaccaaagcctaaggacacactgatgataagcagaacacctgaggtaacctgtgttgttgtggatgtaagccacgaagatccggaggttaagtttaactggtacgtggacggtgtagaagtccataatgctaagacgaagccgagggaggaacaatacaactccacgtatagagtggtctccgtcttgaccgtactccatcaagactggctcaacgggaaagagtacaagtgtaaagtctctaacaaagctcttcctgcaccgattgagaaaaccatatctaaagccaagggacaaccgagagaaccacaggtttacacgctcccccccagtagagacgaacttacaaaaaaccaggtcagtcttacctgcctcgtcaaaggcttctacccctctgacatcgctgttgagtgggaatctaacggccaacctgagaacaattacaaaacaaccccgcctgtccttgactcagacggttccttttttctttacagcaagctgaccgtcgacaaatcacggtggcaacaaggcaatgtgttttcctgttccgtgatgcacgaggcactgcacaaccactacactcaaaaatccctttccctttccccagggggaggtggagggagcggtggaggtggtagcgggggtggaggctcaggtggtgggggttccggcggtggcggaagtggaggcggtggctctggtggtggcggatctggcggaggaggcagcggcggaggtgggtctgggggtggaggctccggaggcgggggaagcggtggaggagggtcagagcccaaaagctccgacaagactcacacatgccccccttgtccagcgcctgaagctgagggtgcgccctctgtcttccttttcccccctaagccgaaagataccctgatgatctcccgcactcccgaagtcacatgtgttgttgtcgacgtatctcatgaagatcctgaggtgaaattcaactggtatgtagacggggtcgaagttcataatgctaagactaagccacgagaagagcaatacaactcaacgtatcgggtggtgagcgttctgacggttctgcaccaagattggcttaatggaaaagagtataagtgcaaggtgtccaacaaggctcttccggcacccatcgaaaagacgatttccaaagcgaaaggccaacctagggaaccgcaagtttacactttgcccccgtcaagagacgaacttaccaagaatcaagtttccctgacgtgccttgtgaagggcttctaccctagcgatatagcagttgagtgggaatctaacggccagcccgaaaataattataagactactccgcccgtgctggacagtgatggttcatttttcctgtattcaaaactcactgtggacaaatctagatggcagcagggtaatgtgttctcttgttcagttatgcacgaggcattgcacaatcactatacgcaaaaaagtttgtctctctctccgggg

SEQ ID NO: 815 - DNA, 873 bp, artificial sequence
  variant BCMA Fc
ctgcaaatggccgggcagtgcagccagaacgaatactttgactccttgttgcacgcatgtattccttgccaactgcgctgttcaagcaacacccccccgctcacgtgtcagcggtactgcaacgcatctgttaccaacagtgtcaaagggactaatgcgggatccggtggaggagggtcagagcccaaaagctccgacaagactcacacatgccccccttgtccagcgcctgaagctgagggtgcgccctctgtcttccttttcccccctaagccgaaagataccctgatgatctcccgcactcccgaagtcacatgtgttgttgtcgacgtatctcatgaagatcctgaggtgaaattcaactggtatgtagacggggtcgaagttcataatgctaagactaagccacgagaagagcaatacaactcaacgtatcgggtggtgagcgttctgacggttctgcaccaagattggcttaatggaaaagagtataagtgcaaggtgtccaacaaggctcttccggcacccatcgaaaagacgatttccaaagcgaaaggccaacctagggaaccgcaagtttacactttgcccccgtcaagagacgaacttaccaagaatcaagtttccctgacgtgccttgtgaagggcttctaccctagcgatatagcagttgagtgggaatctaacggccagcccgaaaataattataagactactccgcccgtgctggacagtgatggttcatttttcctgtattcaaaactcactgtggacaaatctagatggcagcagggtaatgtgttctcttgttcagttatgcacgaggcattgcacaatcactatacgcaaaaaagtttgtctctctctccgggg

SEQ ID NO: 816 - DNA, 1077 bp, artificial sequence
  variant BCMA Fc
ctgcaaatggccgggcagtgcagccagaacgaatactttgactccttgttgcacgcatgtattccttgccaactgcgctgttcaagcaacacccccccgctcacgtgtcagcggtactgcaacgcatctgttaccaacagtgtcaaagggactaatgcgggatccggtggaggagggtcagagcccaaaagctccgacaagactcacacatgccccccttgtccagcgcctgaagctgagggtgcgccctctgtcttccttttcccccctaagccgaaagataccctgatgatctcccgcactcccgaagtcacatgtgttgttgtcgacgtatctcatgaagatcctgaggtgaaattcaactggtatgtagacggggtcgaagttcataatgctaagactaagccacgagaagagcaatacaactcaacgtatcgggtggtgagcgttctgacggttctgcaccaagattggcttaatggaaaagagtataagtgcaaggtgtccaacaaggctcttccggcacccatcgaaaagacgatttccaaagcgaaaggccaacctagggaaccgcaagtttacactttgcccccgtcaagagacgaacttaccaagaatcaagtttccctgacgtgccttgtgaagggcttctaccctagcgatatagcagttgagtgggaatctaacggccagcccgaaaataattataagactactccgcccgtgctggacagtgatggttcatttttcctgtattcaaaactcactgtggacaaatctagatggcagcagggtaatgtgttctcttgttcagttatgcacgaggcattgcacaatcactatacgcaaaaaagtttgtctctctctccggggggaggtggtggatcaggcggtggaggttccggaggaggtggatctctgcaaatggcgggacagtgtagtcaaaatgagtacttcgacagccttcttcatgcctgtattccgtgccaactgcggtgcagcagtaacacgccaccgctcacttgccagaggtattgtaatgccagtgtaactaacagtgtaaaagggactaatgct

SEQ ID NO: 817 - DNA, 1761 bp, artificial sequence
  variant BCMA Fc
ctgcaaatggccgggcagtgcagccagaacgaatactttgactccttgttgctcgcatgtattccttgccaactgcgctgttcaagcaacacccccccgctcacgtgtcagcggtactgcaacgcatctgttaccaacagtgtcaaagggactaatgcgggatccggtggtggcgggtcagggggaggtggaagcgagcccaagtcctcagataagactcatacttgccccccctgtcccgcccctgaggccgaaggcgcaccgtcagtgtttttgttcccaccaaagcctaaggacacactgatgataagcagaacacctgaggtaacctgtgttgttgtggatgtaagccacgaagatccggaggttaagtttaactggtacgtggacggtgtagaagtccataatgctaagacgaagccgagggaggaacaatacaactccacgtatagagtggtctccgtcttgaccgtactccatcaagactggctcaacgggaaagagtacaagtgtaaagtctctaacaaagctcttcctgcaccgattgagaaaaccatatctaaagccaagggacaaccgagagaaccacaggtttacacgctcccccccagtagagacgaacttacaaaaaaccaggtcagtcttacctgcctcgtcaaaggcttctacccctctgacatcgctgttgagtgggaatctaacggccaacctgagaacaattacaaaacaaccccgcctgtccttgactcagacggttccttttttctttacagcaagctgaccgtcgacaaatcacggtggcaacaaggcaatgtgttttcctgttccgtgatgcacgaggcactgcacaaccactacactcaaaaatccctttccctttccccagggggaggtggagggagcggtggaggtggtagcgggggtggaggctcaggtggtgggggttccggcggtggcggaagtggaggcggtggctctggtggtggcggatctggcggaggaggcagcggcggaggtgggtctgggggtggaggctccggaggcgggggaagcggtggaggagggtcagagcccaaaagctccgacaagactcacacatgccccccttgtccagcgcctgaagctgagggtgcgccctctgtcttccttttcccccctaagccgaaagataccctgatgatctcccgcactcccgaagtcacatgtgttgttgtcgacgtatctcatgaagatcctgaggtgaaattcaactggtatgtagacggggtcgaagttcataatgctaagactaagccacgagaagagcaatacaactcaacgtatcgggtggtgagcgttctgacggttctgcaccaagattggcttaatggaaaagagtataagtgcaaggtgtccaacaaggctcttccggcacccatcgaaaagacgatttccaaagcgaaaggccaacctagggaaccgcaagtttacactttgcccccgtcaagagacgaacttaccaagaatcaagtttccctgacgtgccttgtgaagggcttctaccctagcgatatagcagttgagtgggaatctaacggccagcccgaaaataattataagactactccgcccgtgctggacagtgatggttcatttttcctgtattcaaaactcactgtggacaaatctagatggcagcagggtaatgtgttctcttgttcagttatgcacgaggcattgcacaatcactatacgcaaaaaagtttgtctctctctccgggg

SEQ ID NO: 818 - DNA, 873 bp, artificial sequence
  variant BCMA Fc
ctgcaaatggccgggcagtgcagccagaacgaatactttgactccttgttgctcgcatgtattccttgccaactgcgctgttcaagcaacacccccccgctcacgtgtcagcggtactgcaacgcatctgttaccaacagtgtcaaagggactaatgcgggatccggtggaggagggtcagagcccaaaagctccgacaagactcacacatgccccccttgtccagcgcctgaagctgagggtgcgccctctgtcttccttttcccccctaagccgaaagataccctgatgatctcccgcactcccgaagtcacatgtgttgttgtcgacgtatctcatgaagatcctgaggtgaaattcaactggtatgtagacggggtcgaagttcataatgctaagactaagccacgagaagagcaatacaactcaacgtatcgggtggtgagcgttctgacggttctgcaccaagattggcttaatggaaaagagtataagtgcaaggtgtccaacaaggctcttccggcacccatcgaaaagacgatttccaaagcgaaaggccaacctagggaaccgcaagtttacactttgcccccgtcaagagacgaacttaccaagaatcaagtttccctgacgtgccttgtgaagggcttctaccctagcgatatagcagttgagtgggaatctaacggccagcccgaaaataattataagactactccgcccgtgctggacagtgatggttcatttttcctgtattcaaaactcactgtggacaaatctagatggcagcagggtaatgtgttctcttgttcagttatgcacgaggcattgcacaatcactatacgcaaaaaagtttgtctctctctccgggg

SEQ ID NO: 819 - DNA, 1077 bp, artificial sequence
  variant BCMA Fc
ctgcaaatggccgggcagtgcagccagaacgaatactttgactccttgttgctcgcatgtattccttgccaactgcgctgttcaagcaacacccccccgctcacgtgtcagcggtactgcaacgcatctgttaccaacagtgtcaaagggactaatgcgggatccggtggaggagggtcagagcccaaaagctccgacaagactcacacatgccccccttgtccagcgcctgaagctgagggtgcgccctctgtcttccttttcccccctaagccgaaagataccctgatgatctcccgcactcccgaagtcacatgtgttgttgtcgacgtatctcatgaagatcctgaggtgaaattcaactggtatgtagacggggtcgaagttcataatgctaagactaagccacgagaagagcaatacaactcaacgtatcgggtggtgagcgttctgacggttctgcaccaagattggcttaatggaaaagagtataagtgcaaggtgtccaacaaggctcttccggcacccatcgaaaagacgatttccaaagcgaaaggccaacctagggaaccgcaagtttacactttgcccccgtcaagagacgaacttaccaagaatcaagtttccctgacgtgccttgtgaagggcttctaccctagcgatatagcagttgagtgggaatctaacggccagcccgaaaataattataagactactccgcccgtgctggacagtgatggttcatttttcctgtattcaaaactcactgtggacaaatctagatggcagcagggtaatgtgttctcttgttcagttatgcacgaggcattgcacaatcactatacgcaaaaaagtttgtctctctctccggggggaggtggtggatcaggcggtggaggttccggaggaggtggatctctgcaaatggcgggacagtgtagtcaaaatgagtacttcgacgcccttctttacgcctgtattccgtgccaactgcggtgcagcagtaacacgccaccgctcacttgccagcagtattgtaatgccagtgtaactaacagtgtaaaagggactaatgct

SEQ ID NO: 820 - DNA, 1077 bp, artificial sequence
  variant BCMA Fc
ctgcaaatggccgggcagtgcagccagaacgaatactttgactccttgttgctcgcatgtattccttgccaactgcgctgttcaagcaacacccccccgctcacgtgtcagcggtactgcaacgcatctgttaccaacagtgtcaaagggactaatgcgggaggtggtggatcaggcggtggaggttccggaggaggtggatctctgcaaatggcgggacagtgtagtcaaaatgagtacttcgacagccttcttctcgcctgtattccgtgccaactgcggtgcagcagtaacacgccaccgctcacttgccagaggtattgtaatgccagtgtaactaacagtgtaaaagggactaatgctggatccggtggaggagggtcagagcccaaaagctccgacaagactcacacatgccccccttgtccagcgcctgaagctgagggtgcgccctctgtcttccttttcccccctaagccgaaagataccctgatgatctcccgcactcccgaagtcacatgtgttgttgtcgacgtatctcatgaagatcctgaggtgaaattcaactggtatgtagacggggtcgaagttcataatgctaagactaagccacgagaagagcaatacaactcaacgtatcgggtggtgagcgttctgacggttctgcaccaagattggcttaatggaaaagagtataagtgcaaggtgtccaacaaggctcttccggcacccatcgaaaagacgatttccaaagcgaaaggccaacctagggaaccgcaagtttacactttgcccccgtcaagagacgaacttaccaagaatcaagtttccctgacgtgccttgtgaagggcttctaccctagcgatatagcagttgagtgggaatctaacggccagcccgaaaataattataagactactccgcccgtgctggacagtgatggttcatttttcctgtattcaaaactcactgtggacaaatctagatggcagcagggtaatgtgttctcttgttcagttatgcacgaggcattgcacaatcactatacgcaaaaaagtttgtctctctctccgggg

SEQ ID NO: 821 - protein, 522 aa, artificial sequence
  variant Fc
EPKSSDKTHTCPPCPAPEAEGAPSVFLFPPKPKDTLMISRTPEVTCVVVDVSHEDPEVKFNWYVDGVEVHNAKTKPREEQYNSTYRVVSVLTVLHQDWLNGKEYKCKVSNKALPAPIEKTISKAKGQPREPQVYTLPPSRDELTKNQVSLTCLVKGFYPSDIAVEWESNGQPENNYKTTPPVLDSDGSFFLYSKLTVDKSRWQQGNVFSCSVMHEALHNHYTQKSLSLSPGGGGGSGGGGSGGGGSGGGGSGGGGSGGGGSGGGGSGGGGSGGGGSGGGGSGGGGSGGGGSEPKSSDKTHTCPPCPAPEAEGAPSVFLFPPKPKDTLMISRTPEVTCVVVDVSHEDPEVKFNWYVDGVEVHNAKTKPREEQYNSTYRVVSVLTVLHQDWLNGKEYKCKVSNKALPAPIEKTISKAKGQPREPQVYTLPPSRDELTKNQVSLTCLVKGFYPSDIAVEWESNGQPENNYKTTPPVLDSDGSFFLYSKLTVDKSRWQQGNVFSCSVMHEALHNHYTQKSLSLSPG

SEQ ID NO: 822 - protein, 222 aa, artificial sequence
  variant Fc
VECPPCPAPPVAGPSVFLFPPKPKDTLMISRTPEVTCVVVDVSHEDPEVQFNWYVDGVEVHNAKTKPREEQFNSTFRVVSVLTVVHQDWLNGKEYKCKVSNKGLPAPIEKTISKTKGQPREPQVYTLPPSREEMTKNQVSLTCLVKGFYPSDISVEWESNGQPENNYKTTPPMLDSDGSFFLYSKLTVDKSRWQQGNVFSCSVMHEALHNHYTQKSLSLSPG

SEQ ID NO: 823 - protein, 228 aa, artificial sequence
  variant Fc
ESKYGPPCPPCPAPEFLGGPSVFLFPPKPKDTLMISRTPEVTCVVVDVSQEDPEVQFNWYVDGVEVHNAKTKPREEQFNSTYRVVSVLTVLHQDWLNGKEYKCKVSNKGLPSSIEKTISKAKGQPREPQVYTLPPSQEEMTKNQVSLTCLVKGFYPSDIAVEWESNGQPENNYKTTPPVLDSDGSFFLYSRLTVDKSRWQEGNVFSCSVMHEALHNHYTQKSLSLSLG

SEQ ID NO: 824 - protein, 226 aa, artificial sequence
  variant Fc
DKTHTCPPCPAPEAEGAPSVFLFPPKPKDTLMISRTPEVTCVVVDVSHEDPEVKFNWYVDGVEVHNAKTKPREEQYNSTYRVVSVLTVLHQDWLNGKEYKCKVSNKALPAPIEKTISKAKGQPREPQVYTLPPSRDELTKNQVSLTCLVKGFYPSDIAVEWESNGQPENNYKTTPPVLDSDGSFFLYSKLTVDKSRWQQGNVFSCSVMHEALHNHYTQKSLSLSPG

What is claimed:

1. An immunomodulatory protein comprising:
(1) at least one T cell inhibitory molecule (TIM) that binds to (i) a T cell stimulatory receptor, or (ii) a ligand of a T cell stimulatory receptor; and/or that antagonizes activity of a T cell stimulatory receptor; and
(2) at least one B cell inhibitory molecule (BIM) that binds to a ligand of a B cell stimulatory receptor and/or antagonizes activity of a B cell stimulatory receptor.

2. The immunomodulatory protein of claim 1, wherein the TIM binds to a ligand of a T cell stimulatory receptor.

3. The immunomodulatory protein of claim 2, wherein:
the T cell stimulatory receptor is CD28; and/or
the ligand of the T cell stimulatory receptor is CD80 or CD86.

4. The immunomodulatory protein of any of claims 1-3, wherein the TIM is a CTLA-4 extracellular domain or a binding portion thereof that binds to CD80 or CD86.

5. The immunomodulatory protein of claim 4, wherein the CTLA-4 extracellular domain or binding portion thereof is (i) the sequence of amino acids set forth in SEQ ID NO:1 or SEQ ID NO:2, (ii) a variant CTLA-4 sequence of amino acids that has at least 85% sequence identity to SEQ ID NO:1 or SEQ ID NO:2; or (iii) a portion of (i) or (ii) comprising an IgV domain.

6. The immunomodulatory protein of claim 4 or claim 5, wherein the CTLA-4 extracellular domain or the binding portion thereof is set forth in SEQ ID NO:1.

7. The immunomodulatory protein of claim 4 or claim 5, wherein the CTLA-4 extracellular domain or the binding portion thereof is a variant CTLA-4 sequence of amino acids that has at least 85% sequence identity to SEQ ID NO:1 or a portion thereof comprising the IgV domain, wherein the variant CTLA-4 sequence comprises one or more amino acid substitutions in SEQ ID NO:1 or the portion thereof comprising the IgV domain.

8. The immunomodulatory protein of claim 7, wherein the variant CTLA-4 sequence comprises the amino acid substitution C122S.

9. The immunomodulatory protein of any of claims 1-5, 7 and 8, wherein the CTLA-4 extracellular domain or the binding portion thereof is set forth in SEQ ID NO: 668.

10. The immunomodulatory protein of any of claims 7-9, wherein the variant CTLA-4 binds to the ectodomain of CD80 and CD86, optionally wherein binding affinity to one or both of CD80 and CD86 is increased compared to the sequence set forth in SEQ ID NO:1 or the portion thereof comprising the IgV domain.

11. The immunomodulatory protein of any of claims 7-8 and 10, wherein the one or more amino acid substitutions comprise amino acid substitutions selected from L12F, R16H, G29W, T53S, M56T, N58S, L63P, L98Q, or Y105L, or combinations thereof.

12. The immunomodulatory protein of any of claims 7-8, 10 and 11, wherein the one or more amino acid substitutions comprise G29W, L98Q and Y105L.

13. The immunomodulatory protein of any of claims 7-8 and 10-12, wherein the one or more amino acid substitutions are G29W/N58S/L63P/Q82R/L98Q/Y105L, L12F/R16H/G29W/M56T/L98Q/Y105L, T53S/L63P/L98Q, or G29W/L98Q/Y105L.

14. The immunomodulatory protein of any of claims 1-8 and 10-13, wherein the CTLA-4 extracellular domain or the binding portion thereof is set forth in any one of SEQ ID NO:92, SEQ ID NO: 112, SEQ ID NO: 165 or SEQ ID NO: 186 or a portion thereof comprising the IgV domain.

15. The immunomodulatory protein of any of claims 1-14, wherein:
the ligand of a B cell stimulatory receptor is APRIL or BAFF; and/or
the B cell stimulatory receptor is TACI, BCMA, or BAFF-receptor.

16. The immunomodulatory protein of any of claims 1-15, wherein the BIM is a TACI extracellular domain or a binding portion thereof that binds to APRIL, BAFF, or a BAFF/APRIL heterotrimer.

17. The immunomodulatory protein of claim 16, wherein the TACI extracellular domain or the binding portion thereof is an extracellular domain sequence set forth as (i) the sequence of amino acids set forth in SEQ ID NO:709, (ii) a sequence of amino acids that has at least 95% sequence identity to SEQ ID NO:709; or (iii) a portion of (i) or (ii) comprising one or both of a CRD1 domain and CRD2 domain that binds to APRIL, BAFF, or a BAFF/APRIL heterotrimer.

18. The immunomodulatory protein of claim 16 or claim 17, wherein the TACI extracellular domain or the binding portion thereof comprises the CRD1 domain and the CRD2 domain.

19. The immunomodulatory protein of any of claims 16-18, wherein the TACI extracellular domain or the binding portion thereof is a truncated wild-type TACI extracellular domain set forth in SEQ ID NO: 516.

20. The immunomodulatory protein of claim 16 or claim 17, wherein the TACI extracellular domain or the binding portion thereof is a truncated wild-type TACI extracellular domain, that contains the cysteine rich domain 2 (CRD2) but lacks the entirety of the cysteine rich domain 1 (CRD1).

21. The immunomodulatory protein of claim 16, claim 17 or claim 20, wherein the TACI extracellular domain or the binding portion thereof is a truncated wild-type TACI extracellular domain, that consists of a contiguous sequence contained within amino acid residues 67-118 that includes amino acid residues 71-104, with reference to positions set forth in SEQ ID NO:709.

22. The immunomodulatory protein of claim 20 or claim 21, wherein the truncated wild-type TACI extracellular domain or the binding portion thereof is 35, 36, 37, 38, 39, 40, 41, 42, 43, 44, 45, 46, 47, 48, 59, 50 or 51 amino acids in length.

23. The immunomodulatory protein of any of claims 16, 17 and 20-22, wherein the TACI extracellular domain or the binding portion thereof is set forth in SEQ ID NO:528.

24. The immunomodulatory protein of claim 16 or claim 17, wherein the TACI extracellular domain or the binding portion thereof is a variant TACI polypeptide that comprises one or more amino acid substitutions in the extracellular domain (ECD) of a reference TACI polypeptide or a specific binding fragment thereof at positions selected from among 40, 59, 60, 61, 74, 75, 76, 77, 78, 79, 82, 83, 84, 85, 86, 87, 88, 92, 95, 97, 98, 99, 101, 102 and 103, corresponding to numbering of positions set forth in SEQ ID NO:709.

25. The immunomodulatory protein of claim 24, wherein the reference TACI polypeptide is a truncated polypeptide consisting of the extracellular domain of TACI or a specific binding portion thereof that binds to APRIL, BAFF, or a BAFF/APRIL heterotrimer.

26. The immunomodulatory protein of claim 24 or claim 25 wherein the reference TACI polypeptide comprises the sequence of amino acids set forth in SEQ ID NO:709, or a portion of thereof comprising one or both of a CRD1 domain and CRD2 domain that binds to APRIL, BAFF, or a BAFF/APRIL heterotrimer.

27. The immunomodulatory protein of any of claims 24-26, wherein the reference TACI polypeptide comprises the CRD1 domain and the CRD2 domain.

28. The immunomodulatory protein of any of claims 24-27, wherein the reference TACI polypeptide is set forth in SEQ ID NO:516.

29. The immunomodulatory protein of any of claims 24-26, wherein the reference TACI polypeptide is a truncated wild-type TACI extracellular domain that contains the cysteine rich domain 2 (CRD2) but lacks the entirety of the cysteine rich domain 1 (CRD1), wherein the variant TACI polypeptide comprises one or more amino acid substitutions in the truncated wild-type TACI extracellular domain.

30. The immunomodulatory protein of claim 29, wherein the truncated wild-type TACI extracellular domain consists of a contiguous sequence contained within amino acid residues 67-118 that includes amino acid residues 71-104, with reference to positions set forth in SEQ ID NO: 122.

31. The immunomodulatory protein of claim 29 or claim 30, wherein the truncated wild-type TACI extracellular domain is 35, 36, 37, 38, 39, 40, 41, 42, 43, 44, 45, 46, 47, 48, 59, 50 or 51 amino acids in length.

32. The immunomodulatory protein of any of claims 24-26 and 29-31, wherein the reference TACI polypeptide consists essentially of the CRD2 domain.

33. The immunomodulatory protein of any of claims 24-26 and 29-31, wherein the reference TACI polypeptide comprises the sequence set forth in SEQ ID NO:528.

34. The immunomodulatory protein of any of claims 24-26 and 29-33, wherein the reference TACI polypeptide is set forth in SEQ ID NO:528.

35. The immunomodulatory protein of any of claims 24-34, wherein the variant TACI polypeptide comprises one or more amino acid substitutions at positions selected from among 74, 75, 76, 77, 78, 79, 82, 83, 84, 85, 86, 87, 88, 92, 95, 97, 98, 99, 101, 102 and 103, corresponding to numbering set forth in SEQ ID NO:709.

36. The immunomodulatory protein of claim 35, wherein the one or more amino acid substitutions are selected from E74V, Q75E, Q75R, G76S, K77E, F78Y, Y79F, L82H, L82P, L83S, R84G, R84L, R84Q, D85E, D85V, C86Y, I87L, I87M, S88N, I92V, Q95R, P97S, K98T, Q99E, A101D, Y102D, F103S, F103V, F103Y, or a conservative amino acid substitution thereof.

37. The immunomodulatory protein of claim 35 or claim 36, wherein the one or more amino acid substitutions comprise at least one of E74V, K77E, Y79F, L82H, L82P, R84G, R84L, R84Q, D85V, or C86Y.

38. The immunomodulatory protein of any of claims 35-37, wherein the one or more amino acid substitutions comprise an amino acid substitution selected from the group consisting of Q75E, K77E, F78Y, R84G, R84Q, A101D and Y102D, or any combination thereof.

39. The immunomodulatory protein of any of claims 35-38, wherein the one or more amino acid substitutions are D85E/K98T, I87L/K98T, L82P/I87L, G76S/P97S, K77E/R84L/F103Y, Y79F/Q99E, L83S/F103S, K77E/R84Q, K77E/A101D, K77E/F78Y/Y102D, Q75E/R84Q, Q75R/R84G/I92V, K77E/A101D/Y102D, R84Q/S88N/A101D, R84Q/F103V, K77E/Q95R/A101D or I87M/A101D.

40. The immunomodulatory protein of any of claims 35-39, wherein the one or more amino acid substitutiosn are K77E/F78Y/Y102D, Q75E/R84Q, or R84G.

41. The immunomodulatory protein of any of claims 35-40, wherein the variant TACI polypeptide has increased binding affinity to one or both of APRIL and BAFF compared to the reference TACI polypeptide.

42. The immunomodulatory protein of claim 41, wherein the increased binding affinity for BAFF or APRIL is independently increased more than 1.2-fold, 1.5-fold, 2-fold, 3-fold, 4-fold, 5-fold, 6-fold, 7-fold, 8-fold, 9-fold, 10-fold, 20-fold, 30-fold, 40-fold, 50-fold or 60-fold.

43. The immunomodulatory protein of any of claims 35-42, wherein:
the variant TACI polypeptide comprises the sequence set forth in any one of SEQ ID NOS: 517-527, 536, 537, 682-701; or
the variant TACI polypeptide comprises the sequence set forth in any one of SEQ ID NOS: 529-535, 538-550, 673-681 or 760-772.

44. The immunomodulatory protein of any of claims 35-43, wherein the variant TACI polypeptide is set forth in any one of SEQ ID NO:535, SEQ ID NO: 541, SEQ ID NO:542, or SEQ ID NO:688.

45. The immunomodulatory protein of any of claims 1-15, wherein the BIM is a BCMA extracellular domain or a binding portion thereof that binds to APRIL, BAFF, or a BAFF/APRIL heterotrimer.

46. The immunomodulatory protein of claim 45, wherein the BCMA extracellular domain or the binding portion thereof is an extracellular domain sequence set forth as (i) the sequence of amino acids set forth in SEQ ID NO:356, (ii) a sequence of amino acids that has at least 95% sequence identity to SEQ ID NO:356; or (iii) a portion of (i) or (ii) comprising a CRD domain.

47. The immunomodulatory protein of claim 45 or claim 46, wherein the BCMA polypeptide or the binding portion thereof is set forth in SEQ ID NO:356.

48. The immunomodulatory protein of claim 45 or claim 46, wherein the BCMA extracellular domain or the binding portion thereof is a variant BCMA polypeptide comprising one or more amino acid substitutions in the extracellular domain (ECD) of a reference BCMA polypeptide at positions selected from among 9, 10, 11, 14, 16, 19, 20, 22, 25, 27, 29, 30, 31, 32, 35, 36, 39, 43, 45, 46, 47 and 48, corresponding to numbering set forth in SEQ ID NO:710.

49. An immunomodulatory protein comprising a variant BCMA polypeptide, wherein the variant BCMA polypeptide comprises one or more amino acid substitutions in the extracellular domain (ECD) of a reference BCMA polypeptide at positions selected from among 9, 10, 11, 14, 16, 19, 20, 22, 25, 27, 29, 30, 31, 32, 35, 36, 39, 43, 45, 46, 47 and 48, corresponding to numbering of positions set forth in SEQ ID NO:710.

50. An immunomodulatory protein comprising a variant BCMA-Fc fusion protein, wherein the variant BCMA-Fc fusion protein comprises a variant BCMA polypeptide, an Fc region, and a linker between the BCMA polypeptide and Fc region, wherein the variant BCMA polypeptide comprises one or more amino acid substitutions in the extracellular domain (ECD) of an reference BCMA polypeptide corresponding to positions selected from among 9, 10, 11, 14, 16, 19, 20, 22, 25, 27, 29, 30, 31, 32, 35, 36, 39, 43, 45, 46, 47 and 48 with reference to positions set forth in SEQ ID NO:710.

51. The immunomodulatory protein of any of claims 48-50, wherein the reference BCMA polypeptide is the extracellular domain of BCMA or a binding portion thereof that binds to APRIL, BAFF, or a BAFF/APRIL heterotrimer.

52. The immunomodulatory protein of any of claims 48-51, wherein the reference BCMA lacks an N-terminal methionine.

53. The immunomodulatory protein of any of claims 48-52, wherein the reference BCMA polypeptide comprises the sequence of amino acids set forth in SEQ ID NO:356, or a portion thereof comprising a CRD domain.

54. The immunomodulatory protein of any of claims 48-53, wherein the reference BCMA polypeptide is set forth in SEQ ID NO:356.

55. The immunomodulatory protein of any of claims 48-54, wherein the one or more amino acid substitutions are selected from S9G, S9N, S9Y, Q10E, Q10P, N11D, N11S, F14Y, S16A, H19A, H19C, H19D, H19E, H19F, H19G, H19I, H19K, H19L, H19M, H19N, H19P, H19Q, H19R, H19S, H19T, H19V, H19W, H19Y, A20T, I22L, I22V, Q25E, Q25F, Q25G, Q25H, Q25I, Q25K, Q25L, Q25M, Q25S, Q25V, Q25Y, R27H, R27L, S29P, S30G, S30Y, N31D, N31G, N31H, N31K, N31L, N31M, N31P, N31S, N31V, N31Y, T32I, T32S, L35A, L35M, L35P, L35S, L35V, L35Y, T36A, T36G, T36N, T36M, T36S, T36V, R39L, R39Q, A43E, A43S, V45A, V45D, V45I, T46A, T46I, N47D, N47Y, S48G, or a conservative amino acid substitution thereof.

56. The immunomodulatory protein of any of claims 48-55, wherein the one or more amino acid substitution comprise at least one amino acid substitution selected from H19F, H19K, H19L, H19M, H19R or H19Y.

57. The immunomodulatory protein of any of claims 48-56, wherein the one or more amino acid substitutions are H19Y/S30G; H19Y/V45A; F14Y/H19Y; H19Y/V45D; H19Y/A43E; H19Y/T36A; H19Y/I22V; N11D/H19Y; H19Y/T36M; N11S/H19Y; H19Y/L35P/T46A; H19Y/N47D; S9D/H19Y; H19Y/S30G/V45D; H19Y/R39Q; H19Y/L35P; S9D/H19Y/R27H; Q10P/H19Y/Q25H; H19Y/R39L/N47D; N11D/H19Y/N47D; H19Y/T32S; N11S/H19Y/S29P; H19Y/R39Q/N47D; S16A/H19Y/R39Q; S9N/H19Y/N31K/T46I; H19Y/R27L/N31Y/T32S/T36A; N11S/H19Y/T46A; H19Y/T32I; S9G/H19Y/T36S/A43S; H19Y/S48G; S9N/H19Y/I22V/N31D; S9N/H19Y/Q25K/N31D; S9G/H19Y/T32S; H19Y/T36A/N47Y; H19Y/V45A/T46I; H19Y/Q25K/N31D; H19Y/Q25H/R39Q/V45D; H19Y/T32S/N47D; Q10E/H19Y/A20T/T36S; H19Y/T32S/V45I; H19F/Q25E/N31L/L35Y/T36S; H19F/Q25F/N31S/T36S; H19I/Q25F/N31S/T36V; H19F/Q25V/N31M/T36S; H19Y/Q25Y/N31L/L35Y/T36S; H19F/Q25I/N31M/L35A/T36S; H19I/Q25L/N31L/L35Y/T36S; H19F/Q25L/N31G/L35P/T36A; H19Y/I22L/N31G; H19F/I22V/Q25M/N31P/T36M; H19Y/N31L/L35Y/T36S; H19L/S30G/N31H/L35A; H19L/Q25S/N31V/L35S/T36V; H19L/Q25S/S30Y/N31G/L35M/T36V; H19F/Q25F/N31L/L35Y/T36S; H19F/Q25F/N31S/T36G; H19F/I22V/Q25S/N31V/L35S/T36V; H19F/Q25G/N31S/L35V/T36N; H19L/Q25H/N31D/L35S; or H19F/Q25F/N31S/L35Y/T36S.

58. The immunomodulatory protein of any of claims 48-57, wherein the one or more amino acid substitutions are or comprise H19F, H19L, H19K, H19M, H19R, H10Y, N11D/H19Y/N47D, H19Y/R39Q/N47D; S16A/H19Y/R39Q, S9G/H19Y/T32S; H19Y/T36A/N47Y; or Q10E/H19Y/A20T/T36S.

59. The immunomodulatory protein of any of claims 48-58, wherein the one or more amino acid substitutions are or comprise S16A/H19Y/R39Q.

60. The immunomodulatory protein of any of claims 48-59, wherein the variant BCMA polypeptide has increased binding affinity to one or both of APRIL and BAFF compared to the reference TACI polypeptide.

61. The immunomodulatory protein of claim 60, wherein the increased binding affinity for BAFF or APRIL is independently increased more than 1.2-fold, 1.5-fold, 2-fold, 3-fold, 4-fold, 5-fold, 6-fold, 7-fold, 8-fold, 9-fold, 10-fold, 20-fold, 30-fold, 40-fold, 50-fold or 60-fold.

62. The immunomodulatory protein of any of claims 48-61, wherein the variant BCMA polypeptide has up to 10 amino acid substitutions compared to the reference BCMA polypeptide.

63. The immunomodulatory protein of an of claims 48-61, wherein the variant BCMA polypeptide has up to 5 amino acid substitutions compared to the reference BCMA polypeptide.

64. The immunomodulatory protein of any of claims 48-63, wherein the variant BCMA polypeptide has at least 90% sequence identity to SEQ ID NO:356.

65. The immunomodulatory protein of any of claims 48-64, wherein the variant BCMA polypeptide has at least 95% sequence identity to SEQ ID NO:356.

66. The immunomodulatory protein of any of claims 48-65, wherein the variant BCMA polypeptide comprises the sequence set forth in any one of SEQ ID NOS: 357-435.

67. The immunomodulatory protein of any of claims 48-66, wherein the variant BCMA polypeptide is set forth in any one of SEQ ID NOS: 357, 377, 380, 381, 390, 391, 396, 402, 405, 406, 407, or 411.

68. The immunomodulatory protein of any of claims 49 and 51-67, comprising a heterologous moiety that is linked to the variant BCMA polypeptide.

69. The immunomodulatory protein of claim 68, wherein the heterologous moiety is a half-life extending moiety, a multimerization domain, a targeting moiety that binds to a molecule on the surface of a cell, or a detectable label.

70. The immunomodulatory protein of claim 69, wherein the half-life extending moiety comprises a multimerization domain, albumin, an albumin-binding polypeptide, Pro/Ala/Ser (PAS), a C-terminal peptide (CTP) of the beta subunit of human chorionic gonadotropin, polyethylene glycol (PEG), long unstructured hydrophilic sequences of amino acids (XTEN), hydroxyethyl starch (HES), an albumin-binding small molecule, or a combination thereof.

71. The immunomodulatory protein of any of claims 49 and 51-67, that is a BCMA-Fc fusion protein, wherein the variant BCMA polypeptide is linked to an Fc region of an immunoglobulin, optionally via a linker.

72. The immunomodulatory protein of any of claims 50-71, wherein the linker comprises a peptide linker and the peptide linker is selected from GSGGS (SEQ ID NO: 592), GGGGS (G4S; SEQ ID NO: 593), GSGGGGS (SEQ ID NO: 590), GGGGSGGGGS (2×GGGGS; SEQ ID NO: 594), GGGGSGGGGSGGGGS (3×GGGGS; SEQ ID NO: 595), GGGGSGGGGSGGGGSGGGGS (4×GGGGS, SEQ ID NO:600), GGGGSGGGGSGGGGSGGGGSGGGGS (5×GGGGS, SEQ ID NO: 671), GGGGSSA (SEQ ID NO: 596) or combinations thereof.

73. The immunomodulatory protein of any of claims 1-48 and 51-67, wherein the immunomodulatory protein is a single polypeptide chain comprising the at least one TIM and the at least one BIM separated by a linker.

74. The immunomodulatory protein of claim 73, wherein the at least one TIM is amino-terminal to the at least one BIM in the polypeptide.

75. The immunomodulatory protein of claim 73, wherein the at least one TIM is carboxy-terminal to the at least one BIM in the polypeptide.

76. The immunomodulatory protein of any of claims 73-75, wherein the linker comprises a peptide linker and the peptide linker is selected from GSGGS (SEQ ID NO: 592), GGGGS (G4S; SEQ ID NO: 593), GSGGGGS (SEQ ID NO: 590), GGGGSGGGGS (2×GGGGS; SEQ ID NO: 594), GGGGSGGGGSGGGGS (3×GGGGS; SEQ ID NO: 595), GGGGSGGGGSGGGGSGGGGS (4×GGGGS, SEQ ID NO:600), GGGGSGGGGSGGGGSGGGGSGGGGS (5×GGGGS, SEQ ID NO: 671), GGGGSSA (SEQ ID NO: 596), SEQ ID NO: 711 (1×EAAAK), SEQ ID NO: 712 (2×EAAAK), SEQ ID NO: 713 (3×EAAAK), SEQ ID NO: 714 (4×EAAAK), SEQ ID NO: 715 (5×EAAAK), SEQ ID NO: 665 (6×EAAAK), or combinations thereof.

77. The immunomodulatory protein of any of claims 1-48, 51-67 and 73-76, wherein the immunomodulatory protein comprises the sequence of amino acids set forth in any of SEQ ID NOS: 618-623 or 703-708, or a sequence that exhibits at least 85% 86%, 87%, 88%, 89%, 90%, 91%, 92%, 93%, 94%, 95%, 96%, 97%, 98%, 99% or more sequence identity thereto and retains activity.

78. The immunomodulatory protein of any of claims 1-48 and 51-67, wherein the at least one TIM or the at least one BIM is linked to a multimerization moiety that promotes dimerization, wherein the immunomodulatory protein is a dimer.

79. The immunomodulatory protein of claim 78, wherein the multimerization domain is an immunoglobulin Fc region.

80. The immunomodulatory protein of any one of claims 50-72 and 79, wherein the immunoglobulin Fc region is a homodimeric Fc region and the immunomodulatory protein is a homodimer comprising two identical copies of the same polypeptide.

81. The immunomodulatory protein of any one of claims 50-72, 79 and 80, wherein the immunoglobulin Fc region is an IgG2 Fc domain, optionally wherein the IgG2 Fc domain comprises the sequence of amino acids set forth in SEQ ID NO: 726 or 822 or a sequence of amino acids that exhibits at least 95% sequence identity to SEQ ID NO:726 or 822.

82. The immunomodulatory protein of any one of claims 50-72, 79 and 80, wherein the immunoglobulin Fc region is an IgG4 Fc domain comprising the amino acid substitution S228P, optionally wherein the Fc domain comprises the sequence of amino acids set forth in SEQ ID NO: 728 or 823, or a sequence of amino acids that exhibits at least 95% sequence identity to SEQ ID NO: 728 or 823.

83. The immunomodulatory protein of any of claims 50-72, 79 and 80, wherein the immunoglobulin Fc is an IgG1 Fc domain, or is a variant thereof that exhibits reduced binding affinity to an Fc receptor and/or reduced effector function, optionally as compared to a wild-type IgG1 Fc domain.

84. The immunomodulatory protein of any of claims 50-72, 79, 80 and 83, wherein the immunoglobulin Fc comprises the amino acid sequence set forth in SEQ ID NO: 597.

85. The immunomodulatory protein of any of claims 50-72, 79, 80, and 83, wherein the immunoglobulin Fc is a variant IgG1 Fc domain comprising one or more amino acid substitutions selected from L234A, L234V, L235A, L235E, G237A, S267K, R292C, N297G, and V302C, by EU numbering.

86. The immunomodulatory protein of claim 85, wherein the immunoglobulin Fc region contains the amino acid substitutions L234A, L235E an G237A by EU numbering.

87. The immunomodulatory protein of any of claims 50-72, 79, 80, 83, 85 and 86, wherein the Fc is a variant Fc comprising the amino acid sequence set forth in SEQ ID NO:589 or SEQ ID NO: 824.

88. The immunomodulatory protein of any of claims 50-72, 80 and 83-87, wherein the BCMA-Fc fusion protein comprises the structure: BCMA polypeptide (BCMA)-Linker-Fc region.

89. The immunomodulatory protein of any of claims 50-72, 80 and 83-88, wherein the BCMA-Fc fusion protein is set forth in SEQ ID NO:629.

90. An immunomodulatory BCMA-Fc fusion protein that is a homodimer comprising two identical copies of the BCMA-Fc fusion protein set forth in SEQ ID NO: 629 linked by a covalent disulfide bond.

91. The immunomodulatory protein of any of claims 50-72, 80 and 83-87, wherein the BCMA-Fc fusion protein comprises the structure: (BCMA)-Linker-Fc region-Linker-(BCMA).

92. The immunomodulatory protein of any of claims 50-72, 80, 83-87 and 91, wherein the BCMA-Fc fusion protein is set forth in SEQ ID NO: 809 or SEQ ID NO: 812.

93. The immunomodulatory protein of any of claims 50-72, 80 and 83-87, wherein the BCMA-Fc fusion protein comprises the structure: (BCMA)-Linker-(BCMA)-Linker-Fc region.

94. The immunomodulatory protein of any of claims 50-72, 80, 83-87 and 93, wherein the BCMA-Fc fusion protein is set forth in SEQ ID NO: 813.

95. The immunomodulatory protein of any of claims 50-72, 80, and 83-94, wherein the Fc fusion protein neutralizes APRIL and BAFF.

96. The immunomodulatory protein of claim 95, wherein:
the IC50 for neutralizing APRIL is less than 100 pM, less than 50 pM, less than 40 pM, less than 30 pM, less than 20 pM, less than 10 pM, less than 5 pM or less than 1 pM, or is any value between any of the foregoing; and/or
the IC50 for neutralizing BAFF is less than 400 pM, less than 300 pM, less than 200 pM, less than 100 pM, less than 75 pM, less than 50 pM, less than 25 pm, or less than 10 pM, or is any value between any of the foregoing.

97. The immunomodulatory protein of any of claims 50-72, 80, and 83-96, wherein:
the Fe fusion protein blocks binding of APRIL, BAFF, or an APRIL/BAFF heterotrimer to BCMA or TACI; and/or
the Fe fusion protein reduces the levels of circulating APRIL, BAFF, or an APRIL/BAFF in the blood following administration to a subject.

98. The immunomodulatory protein of any one of claims 80-87, wherein each polypeptide of the homodimer comprises the at least one TIM and the at least one BIM and wherein the at least one TIM is amino-terminal to the at least one BIM in each polypeptide.

99. The immunomodulatory protein of any one of claims 80-87, wherein each polypeptide of the homodimer comprises the at least one TIM and the at least one BIM and wherein the at least one TIM is carboxy-terminal to the at least one BIM in each polypeptide.

100. The immunomodulatory protein of any of claims 1-44, 78-87, 98 and 99, wherein the immunomodulatory protein comprises the sequence of amino acids set forth in any of SEQ ID NOS: 610-617, 624-627, 637, 638, 643, 644, 648, 653 654, and 759-792 or a sequence that exhibits at least 85% 86%, 87%, 88%, 89%, 90%, 91%, 92%, 93%, 94%, 95%, 96%, 97%, 98%, 99% or more sequence identity thereto and retains activity.

101. The immunomodulatory protein of any of claims 1-44, 78-87 and 98-100, wherein the TIM is a wild-type CTLA-4 extracellular domain or a binding portion thereof, and the BIM is a TACI extracellular domain or a binding portion thereof comprising amino acid substitutions K77E/F78Y/Y102D, Q75E/R84Q, or R84G, corresponding to positions set forth in SEQ ID NO:709, optionally wherein the TIM is set forth in SEQ ID NO:1 and the BIM is set forth in SEQ ID NO:535, 541, 542, or 688.

102. The immunomodulatory protein of any of claims 1-44, 78-87, and 98-101, wherein the immunomodulatory protein comprises the sequence set forth in SEQ ID NO:611, SEQ ID NO:788, SEQ ID NO: 789, SEQ ID NO: 790, or SEQ ID NO: 792.

103. An immunomodulatory protein that is a homodimer comprising two identical copies of the Fc fusion protein set forth in SEQ ID NO: 611 linked by a covalent disulfide bond.

104. An immunomodulatory protein that is a homodimer comprising two identical copies of the Fc fusion protein set forth in SEQ ID NO: 788 linked by a covalent disulfide bond.

105. An immunomodulatory protein that is a homodimer comprising two identical copies of the Fc fusion protein set forth in SEQ ID NO: 789 linked by a covalent disulfide bond.

106. An immunomodulatory protein that is a homodimer comprising two identical copies of the Fc fusion protein set forth in SEQ ID NO: 790 linked by a covalent disulfide bond.

107. An immunomodulatory protein that is a homodimer comprising two identical copies of the Fc fusion protein set forth in SEQ ID NO: 792 linked by a covalent disulfide bond.

108. The immunomodulatory protein of any of claims 1-44, 78-87 and 98-100, wherein the TIM is a wild-type CTLA-4 extracellular domain or a binding portion thereof, and the BIM is a truncated TACI extracellular domain comprising the CRD2 domain, optionally wherein the TIM is set forth in SEQ ID NO:1 and the BIM is set forth in SEQ ID NO:528.

109. The immunomodulatory protein of any of claims 1-44, 78-87, 98-100 and 108, wherein the immunomodulatory protein comprises the sequence set forth in SEQ ID NO:759, SEQ ID NO: 786 SEQ ID NO: 787 or SEQ ID NO: 791.

110. An immunomodulatory protein that is a homodimer comprising two identical copies of the Fc fusion protein set forth in SEQ ID NO: 759 linked by a covalent disulfide bond.

111. An immunomodulatory protein that is a homodimer comprising two identical copies of the Fc fusion protein set forth in SEQ ID NO: 786 linked by a covalent disulfide bond.

112. An immunomodulatory protein that is a homodimer comprising two identical copies of the Fc fusion protein set forth in SEQ ID NO: 787 linked by a covalent disulfide bond.

113. An immunomodulatory protein that is a homodimer comprising two identical copies of the Fc fusion protein set forth in SEQ ID NO: 791 linked by a covalent disulfide bond.

114. The immunomodulatory protein of any of claims 1-44, 78-87 and 98-100, wherein the TIM is a CTLA-4 extracellular domain or a binding portion thereof, comprising amino acid substitutions G29W/L98Q/Y105L corresponding to positions set forth in SEQ ID NO: 1, and the BIM is a TACI extracellular domain or a binding portion thereof comprising amino acid substitutions K77E/F78Y/Y102D, Q75E/R84Q, or R84G, corresponding to positions set forth in SEQ ID NO:709, optionally wherein the TIM is set forth in SEQ ID NO: 186 and the BIM is set forth in SEQ ID NO:535, 541, 542, or 688.

115. The immunomodulatory protein of any of claims 1-44, 78-87, 98-100 and 114, wherein the immunomodulatory protein comprises he sequence set forth in SEQ ID NO:610.

116. An immunomodulatory protein comprising two identical copies of the Fc fusion protein set forth in SEQ ID NO: 610 linked by a covalent disulfide bond.

117. The immunomodulatory protein of any of claims 1-15, 45-48, 51-67, 78-87, 98 and 99, wherein the immunomodulatory protein comprises the sequence of amino acids set forth in any of SEQ ID NOS: 601-609, 631-636, 645-647, 649-652, 655-659, or a sequence that exhibits at least 85% 86%, 87%, 88%, 89%, 90%, 91%, 92%, 93%, 94%, 95%, 96%, 97%, 98%, 99% or more sequence identity thereto and retains activity.

118. The immunomodulatory protein of any of claims 1-15, 45-48, 51-67, 78-87, 98, 99 and 117, wherein the TIM is a wild-type CTLA-4 extracellular domain or a binding portion thereof, and the BIM is a BCMA extracellular domain or a binding portion thereof comprising the amino acid substitution H19L corresponding to positions set forth in SEQ ID NO:710, optionally wherein the TIM is set forth in SEQ ID NO:1 and the BIM is set forth in SEQ ID NO:406, more optionally wherein the immunomodulatory protein comprises the sequence set forth in SEQ ID NO:602.

119. An immunomodulatory protein that is a homodimer comprising two identical copies of the Fc fusion protein set forth in SEQ ID NO: 602 linked by a covalent disulfide bond.

120. The immunomodulatory protein of any of claims 1-15, 45-48, 51-67, 78-87, 98, 99 and 117, wherein the TIM is a CTLA-4 extracellular domain or a binding portion thereof comprising the amino acid substitutions G29W/L98Q/Y105L corresponding to positions set forth in SEQ ID NO: 1, and the BIM is a BCMA extracellular domain or a binding portion thereof comprising the amino acid substitution H19L with reference to positions set forth in SEQ ID NO:710, optionally wherein the TIM is set forth in SEQ ID NO: 186 and the BIM is set forth in SEQ ID NO:406, more optionally wherein the immunomodulatory protein comprises the sequence set forth in SEQ ID NO:601.

121. An immunomodulatory protein that is a homodimer comprising two identical copies of the Fc fusion protein set forth in SEQ ID NO: 601 linked by a covalent disulfide bond.

122. The immunomodulatory protein of claim 79, wherein the immunoglobulin Fc region is a heterodimeric Fc region and the immunomodulatory protein is a heterodimer comprising a first and second polypeptide, wherein the first polypeptide comprises one of the at least one BIM or the at least one TIM and the second polypeptide comprises the other of the at least one BIM and the at least one TIM.

123. The immunomodulatory protein of claim 122, wherein the heterodimeric Fc comprises one or more amino acid modifications in a wild-type Fc domain to effect heterodimer formation between the polypeptides, optionally wherein the wild-type Fc region is an IgG1 Fc region.

124. The immunomodulatory protein of claim 123, wherein the one more amino acid modifications are selected from a knob-into-hole modification and a charge mutation to reduce or prevent self-association due to charge repulsion.

125. The immunomodulatory protein of any of claims 122-124, wherein the heterodimeric Fc region further comprises one or more amino acid substitutions to reduced binding affinity to an Fc receptor and/or reduced effector function, optionally as compared to a wild-type IgG1 Fc domain.

126. The immunomodulatory protein of claim 125, wherein the one or more amino acid substitutions are selected from L234A, L234V, L235A, L235E, G237A, S267K, R292C, N297G, and V302C, by EU numbering.

127. The immunomodulatory protein of claim 125 or claim 126, wherein the immunoglobulin Fc region contains the amino acid substitutions L234A, L235E an G237A by EU numbering.

128. The immunomodulatory protein of any of claims 122-127, wherein the heterodimer comprises a first polypeptide comprising the sequence of amino acids set forth in SEQ ID NO: 662 or 663 and a second polypeptide comprising the sequence of amino acids set forth in SEQ ID NO:660.

129. The immunomodulatory protein of any of claims 1-128, wherein:
the immunomodulatory protein blocks binding of APRIL, BAFF, or an APRIL/BAFF heterotrimer to BCMA or TACI; and/or
the immunomodulatory protein reduces the levels of circulating APRIL, BAFF, or an APRIL/BAFF in the blood following administration to a subject.

130. The immunomodulatory protein of any of claims 1-129, wherein the immunomodulatory protein reduces or inhibits B cell maturation, differentiation and/or proliferation.

131. The immunomodulatory protein of any of claims 1-48, 51-87 and 98-130, wherein:
the immunomodulatory protein blocks binding of CD80 or CD86 to a costimulatory receptor, optionally wherein the costimulatory receptor is CD28; and/or
the immunomodulatory protein reduces or inhibits T cell costimulation.

132. A nucleic acid molecule(s) encoding the immunomodulatory protein of any of claims 1-131.

133. A vector, comprising the nucleic acid molecule of claim 132.

134. The vector of claim 133 that is an expression vector.

135. The vector of claim 133 or claim 134, wherein the vector is a mammalian expression vector or a viral vector.

136. A cell, comprising the nucleic acid of claim 132 or the vector of any of any of claims 133-135.

137. A method of producing an immunomodulatory protein, comprising introducing the nucleic acid molecule of claim 132 or vector of any of claims 133-135 into a host cell under conditions to express the protein in the cell.

138. The method of claim 137, further comprising isolating or purifying the immunomodulatory protein from the cell.

139. An immunomodulatory protein produced by the method of claim 137 or claim 138.

140. A pharmaceutical composition, comprising the immunomodulatory protein of any of claims 1-131 and 139.

141. The pharmaceutical composition of claim 140, comprising a pharmaceutically acceptable excipient.

142. An article of manufacture comprising the pharmaceutical composition of any of claim 140 or claim 141 in a vial or container.

143. A kit comprising the article of manufacture of claim 142, and instructions for use.

144. A method of reducing an immune response in a subject, comprising administering the immunomodulatory protein of any of claims 1-131 or the pharmaceutical composition of claim 140 or claim 141 to a subject in need thereof.

145. The method of claim 144, wherein a B cell immune response is reduced in the subject, whereby B cell maturation, differentiation and/or proliferation is reduced or inhibited.

146. The method of claim 144 or claim 145, wherein circulating levels of APRIL, BAFF or an APRIL/BAFF heterotrimer are reduced in the subject.

147. The method of any of claims 144-146, wherein a T cell immune response is reduced in the subject, whereby T cell costimulation is reduced or inhibited.

148. The method of any of claims 144-147, wherein reducing the immune response treats a disease, disorder or condition in the subject.

149. A method of reducing circulating levels of APRIL, BAFF or an APRIL/BAFF heterotrimer in a subject comprising administering the immunomodulatory protein of any of claims 1-131 or the pharmaceutical composition of claim 140 or claim 141 to the subject.

150. A method of treating a disease, disorder or condition in a subject, comprising administering the immunomodulatory protein of any of claims 1-131 or the pharmaceutical composition of claim 140 or claim 141 to a subject in need thereof.

151. The method of claim 148 or claim 150, wherein the disease, disorder or condition is an autoimmune disease, and inflammatory condition, a B cell cancer, an antibody-mediated pathology, a renal disease, a graft rejection, graft versus host disease, or a viral infection.

152. The method of claim 148, claim 150 or claim 151, wherein the disease, disorder or condition is selected from the group consisting of Systemic lupus erythematosus (SLE); Sjögren's syndrome, scleroderma, Multiple sclerosis, diabetes, polymyositis, primary biliary cirrhosis, IgA nephropathy, IgA vasculitis, optic neuritis, amyloidosis, antiphospholipid antibody syndrome (APS), autoimmune polyglandular syndrome type II (APS II), autoimmune thyroid disease (AITD), Graves' disease, autoimmune adrenalitis and pemphigus vulgaris.

153. The method of any of claims 148 and 150-152, wherein the disease, disorder or condition is a B cell cancer and the cancer is myeloma.

154. A pharmaceutical composition of claim 140 or claim 141 for use in reducing an immune response in a subject.

155. Use of an immunomodulatory protein of any of claims 1-131 or the pharmaceutical composition of claim 140 or claim 141 in the manufacture of a medicament for reducing an immune response in a subject.

156. The pharmaceutical composition for use of claim 154 or the use of claim 155, wherein the immune response is a B cell immune response, wherein reducing the immune response reduces or inhibits B cell maturation, differentiation and/or proliferation.

157. The pharmaceutical composition for use or the use of any of claims 154-156, wherein reducing the immune response reduces circulating levels of APRIL, BAFF or an APRIL/BAFF heterotrimer in the subject.

158. The pharmaceutical composition for use or the use of any of claims 154-157, wherein a T cell immune response is reduced in the subject, whereby T cell costimulation is reduced or inhibited.

159. The pharmaceutical composition for use or the use of any of claims 154-158, wherein reducing the immune response treats a disease, disorder or condition in the subject.

160. A pharmaceutical composition of claim 140 or claim 141 for use in treating a disease, disorder or condition in a subject.

161. Use of an immunomodulatory protein of any of claims 1-131 or the pharmaceutical composition of claim 140 or claim 141 in the manufacture of a medicament for treating a disease, disorder or condition in a subject.

162. The pharmaceutical composition for use of claim 160 or the use of claim 161, wherein the disease, disorder or condition is an autoimmune disease, an inflammatory condition, a B cell cancer, an antibody-mediated pathology, a renal disease, a graft rejection, graft versus host disease, or a viral infection.

163. The pharmaceutical composition for use or the use of any of claims 159-162, wherein the disease, disorder or condition is selected from the group consisting of Systemic lupus erythematosus (SLE); Sjögren's syndrome, scleroderma, Multiple sclerosis, diabetes, polymyositis, primary biliary cirrhosis, IgA nephropathy, IgA vasculitis, optic neuritis, amyloidosis, antiphospholipid antibody syndrome (APS), autoimmune polyglandular syndrome type II (APS II), autoimmune thyroid disease (AITD), Graves' disease, autoimmune adrenalitis and pemphigus vulgaris.

164. The pharmaceutical composition for use or the use of any of claims 159-162, wherein the disease, disorder or condition is a B cell cancer and the cancer is myeloma.
